United States Patent Application Publication US 2022/0211063 A1 - sequence listing, part 50

SEQ ID NO: 152 - DNA, 7752678 bp, Penicillium roqueforti (residues 3,876,341-5,814,510 of 7,752,678)
  misc_feature (471)..(2988): n is a, c, g, or t
  misc_feature (125068)..(125241): n is a, c, g, or t
  misc_feature (177028)..(177803): n is a, c, g, or t
  misc_feature (384131)..(384321): n is a, c, g, or t
  misc_feature (555862)..(555887): n is a, c, g, or t
  misc_feature (601276)..(601376): n is a, c, g, or t
  misc_feature (676767)..(677111): n is a, c, g, or t
  misc_feature (719510)..(719709): n is a, c, g, or t
  misc_feature (1142758)..(1142975): n is a, c, g, or t
  misc_feature (1186306)..(1186928): n is a, c, g, or t
  misc_feature (1335789)..(1335960): n is a, c, g, or t
  misc_feature (1623890)..(1624078): n is a, c, g, or t
  misc_feature (1638029)..(1638196): n is a, c, g, or t
  misc_feature (1653209)..(1653330): n is a, c, g, or t
  misc_feature (1825533)..(1825713): n is a, c, g, or t
  misc_feature (2226335)..(2226483): n is a, c, g, or t
  misc_feature (2393326)..(2393492): n is a, c, g, or t
  misc_feature (2448029)..(2448167): n is a, c, g, or t
  misc_feature (2535304)..(2535417): n is a, c, g, or t
  misc_feature (2536977)..(2537199): n is a, c, g, or t
  misc_feature (2854122)..(2854160): n is a, c, g, or t
  misc_feature (2984525)..(2984774): n is a, c, g, or t
  misc_feature (3020827)..(3020986): n is a, c, g, or t
  misc_feature (3033663)..(3034040): n is a, c, g, or t
  misc_feature (3159256)..(3159377): n is a, c, g, or t
  misc_feature (3215490)..(3215755): n is a, c, g, or t
  misc_feature (3224550)..(3224852): n is a, c, g, or t
  misc_feature (3317434)..(3317714): n is a, c, g, or t
  misc_feature (3542082)..(3542257): n is a, c, g, or t
  misc_feature (3623089)..(3671588): n is a, c, g, or t
  misc_feature (3674128)..(3676164): n is a, c, g, or t
  misc_feature (3690938)..(3691172): n is a, c, g, or t
  misc_feature (3731683)..(3731941): n is a, c, g, or t
  misc_feature (3989065)..(3989240): n is a, c, g, or t
  misc_feature (3992024)..(3992135): n is a, c, g, or t
  misc_feature (4101379)..(4101816): n is a, c, g, or t
  misc_feature (4338959)..(4339088): n is a, c, g, or t
  misc_feature (4339466)..(4339770): n is a, c, g, or t
  misc_feature (4384133)..(4384295): n is a, c, g, or t
  misc_feature (4533774)..(4534000): n is a, c, g, or t
  misc_feature (4697051)..(4697221): n is a, c, g, or t
  misc_feature (4793842)..(4796557): n is a, c, g, or t
  misc_feature (4802159)..(4802531): n is a, c, g, or t
  misc_feature (5082424)..(5082567): n is a, c, g, or t
  misc_feature (5096606)..(5096762): n is a, c, g, or t
  misc_feature (5239354)..(5239492): n is a, c, g, or t
  misc_feature (5277707)..(5277891): n is a, c, g, or t
  misc_feature (5381105)..(5381304): n is a, c, g, or t
  misc_feature (5479285)..(5479716): n is a, c, g, or t
  misc_feature (5512271)..(5512467): n is a, c, g, or t
  misc_feature (5631202)..(5631289): n is a, c, g, or t
  misc_feature (5721684)..(5721908): n is a, c, g, or t
  misc_feature (5728801)..(5728946): n is a, c, g, or t
  misc_feature (5773994)..(5774083): n is a, c, g, or t
  misc_feature (5808460)..(5808504): n is a, c, g, or t
  misc_feature (5832936)..(5833053): n is a, c, g, or t
  misc_feature (5846493)..(5846684): n is a, c, g, or t
  misc_feature (5859621)..(5864342): n is a, c, g, or t
  misc_feature (5865323)..(5948322): n is a, c, g, or t
  misc_feature (5948903)..(5949337): n is a, c, g, or t
  misc_feature (6008391)..(6008479): n is a, c, g, or t
  misc_feature (6324361)..(6325082): n is a, c, g, or t
  misc_feature (6373211)..(6373571): n is a, c, g, or t
  misc_feature (6805550)..(6805552): n is a, c, g, or t
  misc_feature (6846983)..(6847998): n is a, c, g, or t
  misc_feature (6999682)..(6999814): n is a, c, g, or t
  misc_feature (7043444)..(7047251): n is a, c, g, or t
  misc_feature (7056989)..(7057494): n is a, c, g, or t
  misc_feature (7108394)..(7109165): n is a, c, g, or t
  misc_feature (7114302)..(7114990): n is a, c, g, or t
  misc_feature (7152080)..(7152275): n is a, c, g, or t
  misc_feature (7347407)..(7347513): n is a, c, g, or t
  misc_feature (7355670)..(7355674): n is a, c, g, or t
  misc_feature (7379152)..(7379426): n is a, c, g, or t
  misc_feature (7441573)..(7441798): n is a, c, g, or t
  misc_feature (7524923)..(7525042): n is a, c, g, or t
  misc_feature (7750535)..(7752448): n is a, c, g, or t
ctcgcctccaatagaatccaggtgctggagaaggcattggaattcggtaatttgtagcatggttacggcgtagtgtgaactagagatacttcgtgttgattgtagctccactgttcggagtactccgtagttgttattgccacgccaggagtggggttgaaaattgtgtcgacttgcagggtagtacacttcaaccctgtcgatttagacccccttaatatcggaatccttaatgtcggaatcagcacttcgtatgttgtactatatttacaatcttgctggccagaattaattagcttataatagggcacaaaggcctaggcccagaaatgtgaacttgtggaatagggctcactacccacgtgatctgttatattgtccttcactctttctttatttaaataccaaccagtaatatcttgtatcttgtaaagaattaataaaagataccttactttactggacaaccttggaattaaatcaacggggtttgggtcttgactgtgtattggcccgtggatctactggttcaccggctccactctccggggcccgggggccgagcccctgcgcacgctcccctcggtaaatcgggcattgttgtacggagaacttccgtactcagaatctcagcttgaccaacacgcccagactcgagaatctcttcccacagataaagtgcggagtatttcggagatagtttcctttcgaatcaatcaactgcaaaatcaatgattagctcgctcagtaccaggcacaccttgctttggcgggacaagactccttgcatgagaaggatgcatgattgggactgactgtagattgaaaaccccgttgtctgattggcatcttgtcttcttcctctttgccatcactctcactatgacccccctcatacccctcgccctgctcagcctcatctcctacttcatatactaccatgttataaagccctacttcctctctccactctcttccatccccaatgctcacttcacgtcacccatctccagcggctggattgaccgcaagcgcagcacaagcacggaagtcctcgccatctacgccctacaccaaaagcacggccccattgtccgtctcggcccaaaggagctgagtgtcaattctctccaaggtctgaagataatatataccggcgctttcgagaaacatccgttctacaacgatgtcttcgtcaacttcaacaccgaaaatttggtcggcatggtccacaatgcgccgcacgcgcaccaaaagcgcatgctgagcaagatttactccaagtcatatctccaggaatctagtgatctgcgggcgatctcaaaagttgtgctttgggaacgattgatgcctattctcaagaaggtgggggagggtggagaggtggtgaatgtgctgcccctcttccaggctgttggaatggactttacctcctctttcctatttggattgagacacgggacgaggtatttgtttgatattcccgagtggaagttatggttggaagagtatgagcggttcaagtatttgagtcgagacgatcggtttatggggttcattgaggggtggtgcttagggttatgcgcgggggtggaagcatctcaaaagcaggacgtcttcggcgatgaggacaaactgccatccacgaacccagtcgtctacgaccagctgcaccagagcctcctaaaccagaaggaatacgattcgcgtccgttgaacctagtagttgcgtccgaattactggaccacctaattgcaggccacgaaacgtcaggaatcaccttcacgtacatgatgtgggagctatcgcagcatccagaggttgaggccgagctgcgaaaggaacttcttaccttatcgccatccctccaatacccagccacagacggagagaaacccctccccgctccttccgcgatcgacgctctccccctgctggacgctattgtccgcgagactctccgtcttcactccccagccccaacacaactcccccgcgtgaccccaaccacagaaaaaggaacttctctgcacggatacgacagcatcccaggcggtgtgagggtcagctcaacagcctactccctccatcgcatcagcgagatctacccgcgcccgctggaatggctgcctcgacggtggatcgaggcaggagacaatattcatgacatgaggcggctgttctgggcgttcgggagcggtggacgcatgtgtctggggagtaatttcgcattgcaaggtatgcctcccgagtatgggtttcggagaacacactaatgatgcagaaatcaaattggtcatggcggctgtatattcaaattacacgacgtctattgtcgacgacgagggtattgagcaggaccacgctttcatctcgctgccacgtgggcggaagctgatgttgaggtttatcccggtctatgaatgatgcgatgcagtcatgatgatatcaaaagtaatgaaaagcttttttttaatgctttgaccatgtctcaccaacggtcttgagcacaatgtcgacttctctccgcaatttctgattgatggaggagtagagacatctggatagatcattggcgatgaaaatagtcctctaggaacgagtaactcaccttgcgtacacaactagcgccacctggttgttggtgtcaatatgaatacgctcaatatatatcattggttgtattcagcctttagcttcatattattgtttagttacatattcatgaatcaaaagatcattaaacttggttactgttattatagcattatctttcatatagaacatagtggctaatcgatcctcatgatgattaggcaagctttgattccaaagacctcaacaaactccgagccaccaagaaagccatatcggactttcttcctaggtattgaagtgcacggatcaaaaactcacaattctgccggaagcactcagtatacatcttctgatctgtgggaacatccaagttctctaccaagatatatcccgccttggcaaaacaatgaactagcacagccgtccacggttcgactaggaaggcaacttcactgagagaatcgtggaaatgatggttcatgaacgattcctgcccttgtatcgaagcccgggcaagtccaccaactgccaacgcattattcattctaagcgtagcaaccaaatgtgtagtttgtcgagcttcacgtgcaagatcagagccaagtctgcatttatcaatgctctctagtacgtccgccaaaagcatcgtggcgaggtgccagtggccgtcgaggataacataccacgactgtatgcgagacggaagcagttcatggttggtgacgcaatcaaccatgaaactctggtatgtggaatcccagtgttggcagaccaggagggtcttctggataatattttcaatatgctcgggacttgcgcctcggtagaccatagtttgaagttgtgtcacccgacggtaaaggagcactttgacaggagtcgcctctgaaagtatggatgcggcttcttcgtaggagcatggccacctcggctggatttggctcgatccctgacgttgtattgaagaccgaagaaataaatctccccagacgtcttctttcccgtgggcattgcttggaatattccaggggtcgaaattaatcggatctctgggctctcctattggcgaagttgttgaaatttgactatcctcatccgacactactaaagggcgctgatacattgcagcactcagggtatcaaacataacacctagccaaaacatcagatctagcgtagtgcggtgttcatgactagtcaggagtggatcaagtggaggctccgacggttgtggtattcccagcacattcgccgttgtctggtctatcgggcccctcccaagccctctcattttaggagcagcctcccgctgcagtctcgtgaacttgtgccggaaagtgaaaatttgacggttggcagattccaaaaatattggagcgcgatcattctctaaaagctcccccaagcttgtttcctgtcctttgtccagcggactttgtgtcaaagagaaaattatgttcgcgaaggcgatgcgaaaagacggaatactgctcgaatgctccaaagcgtgccgtgcttcgttccagactttctgtcggatcgacctctcatcattgtcgattgccgaggggaccgacgcaccggtgcccttctgcgcatgttgagcccactgcgatgcaaatgacataatcgctagatgaagcgcccgagccgcctttgtatcttcttctgcacttaacgctctgccacgtattgaggatgatactcgatccaactgacagacccgaatacacatcctgttcgaccaattcggtccccattctttcatgcctcgatcgggaaccacttgactgatcgagtcactgtaaggacagttgtgctctgtcaaccaacatgacaaagcattctccatgctgtcgtggtaaatgcggactaggttgcgcgacattgtcgcccgagcgctttgcttagctgtattttcggacgcgatgcaaaagttccattgcggtggcgtgtttgagcttcggtcagacgcagactcggacggatgtttctgtcgactcggtttccacgttgaaaccgttgatataagatcagaggtgggtgtatattcctgttgtggcaataagctgtatgtgctgccgacagaacttggtgccaaatccaaaagggcgtctgattccgcggagtctggggatccattcggcattgagttattaatttgcaaatcgtatgggatgttcatcgcccatggaaatgactgcgactggtcatcgcttgaattttgggtttggaatgactccataaagtgattttccgggtgtgacgatgatgaggacgaggcgtaatccgaggtttcaggggacccaagcaattcaggcaattctccaagatcggcgggatgcgtttgtgcagagcgcagtatctcctcaagagcttcgtcatgagagcctacgacagatgcttttgcggtgttggttttgattcgttttcgactccctctcgagtccacgcgcttggaggagatccagttgaatgtgcactcctttttccatcgtgtgcagtttgagcaagtactgaatgtgctcttttggcgatctttctaagtataaaagttagcgaccgccgtggatgacacagaaacatgttaacgaacaggtgcgtcgcagcctcttttgcccttgcgacatggatcacagctatgaagctgacgccgacgggagtcttccatgctaagctattgcatgtattattggtgagttatatgtaccggaaagaaggcagatgggtggccccgatatgcggaagaagtacgaaaggggcctccagaccaagatatttcataattcctgggggaacacgtgaactttgcagagtgcggagtgagtttaagtggggtaaaaggtaaaagtgggggagctagggcttgtatccgtccatggctcgacacgagtcatcttcggtccagaggaactgtgattggacattgctcgagtatagaatgcttcaagtagataatatctggtgtgccaggttatagaaacatctgggtctgacgtgtaaagaatccaaggctgtgaacagcactggttgacctcaggttacagcgcaggaggtggcgcattcttgcgatgacgccgatcggccaattgtctcaccgagaccgagccaatcgtataagcccaccgtcacgggatgtggtcacgggctcgcccgcagttactaaaatatcagagattgatcttcaatgtgatcgaccaattgaacgggtaggcagcgtcgtggttgtgattttacatacattaaggggtaagattttccccacagaatgcccgcccaatttatccttattctggtctgatgaaccagctctccaatcaattgatgatgtaatcaattgatatgcttggctgactgggcacggtctacaagaacttttacagtagctacgtccaagaatgatttctgcacattgcactcaatactcaatatgtagagttgattttctatggtatttacaaattggaaccaaacagctattgaaaaccttcccagcgatctgaagctcacgacttttggaggtgaacgcggactgtcttcacctccgtgtagttctccagggcgtatgatcccagctctctgccgatacctgactccttgaaaccaccgaatggcatttggtagtgaagggtgttgtagttgttaacccagacggttctattgcaagatatgttagcgaattcatgaagctcagagactagctttgcttttcaattgactcacccagccttgacagcgttggacactctgatggcagtgttaatgtttgtggtgtggacagctgcggccaagcctattttgatccgttagtcagatcatggaagtcaaatggaatgtaacatctcggagtacttaccgtagtttgtggaattggccactctgatagcctcctcctcggtggagaatttctgcaccgtgcacacaggtccaaagatctcttctttgacaatcgtcatgttctcgtcgacatcagcaaagattgtgggttgaatgtagtatccttcgctgccatgacgatcgccaccagtgacaacagtggcgccagcaccctttccgtccttaatataacccatgatccggtcatattggagctgcgagacttgcggtccctggaaggtctcggaatggaacggatctccgaccttgttctgctctgttcgcttcttgaaaagctctaggaacttgtgatagatgtcttcgtgaacaagaatgcgagagcctgcacaacagcactgtccatggttgaagaagatacccagattgacccattcgattgcatcctccaagttcgcatctgggagaatgatgttcggcgacttgccgccgagctcgagagtgactttcttcaagttactatcggctgctgccttcatgatgtgacgtccgaccagagtcgatccagtgaaagcaaccttgtcaatatccatgtgagaggcgattgctgcaccggcagttcttccgaatcctgaaataacattgaccactccaggggggaatccggcttccttgataagcttggcgacatagagcgctgaaaggggagtttgctcggctgtcttgataacaattgtatttccggtggccagagcagggccaattttccaagcgaacatcaagagcgggaagttccatggaataatttggccacagacacccactggctcgtggcgcgtgtaggtcaagctgttgctatcagtgtcgatggtttggccgtaaatcttgtcggaccagccaccatagtaccgcaggcaccctgcggagttatttacatcccctttggccattgtcactgacttgccgttatcaagtgcttcaatagcggccaatgtttcgatgtcgcgttctaggaagtctgcaagacgaagaaggagacgaccacgttcggatggcgtaattgttttccactctccattcagtgcggtacgagcagctttcacggcaatgttgacatcttcctctgcgccttcgtgcacggcgacaataggcttctcgttgtgagggttgattgtctcgaaggttctgccggccacacccttgatgaattcattgttgatgaatcttatggttttgtcagtttcttgcccaggatcattaaggtttgttaaacttacagtcccaaaggttgctcatatgtgagcacgggggtcttaatcgattggaaaagtgccatggttggaaagagaagtcggtggtatagactgaacaggatgtgagatatgggagatgtatgagaattgtgaggaaccataggcacccttatatagctgctggaaaggacccgggtggcgaaaatgatcggggtgggggagcgcggggaaagcatcgcaatcgataaaggccggtccgatgtttttcgctaattgtggggtagcaaaccccctgcctccgtttttggctgtgatgggcacttcctttcgtccggaccgctatcattcgtcgggtgttggaagcgggaaatgaagcaaccccgtcttttggtcctgtgatgaagctctcggtgtgggatacagcggtcccgaatggatcattttttggtaagatcaattatttccagctattcccacctagacaataacacaagtttaacatcttatttgagtaacggcgcatttgcatttattactagtatcatgcttctatatcaaataactttcaatctagcgggctcgtacaaagtgtaaatagttcgcctatcactgatagtcattcacgcaacacaaggcaggtactctattttgtccgcaaccgctcggtccacggctggggcgtccccgttcgataataaacttgataataagctcgtggttcccgaggttgtgtggagactagtcaaatgcaagacatagctctagaagccaaacccaacatcagcgaataatatggcaagtgtatcaacctttgaacgtcattcaaattcagtatctcaatttacaaatcccagaaatccacacctaagtctccactcctatatacagcatattctcagtccataatctgtgcctagagcacaattcaccaatcattatttactccggcatctcaagcacatagcggccggcaatcttgccttgttctgtttcgagttagcttcaagtccaaatagcagtgtgacagtgtgacatacccataagctcgaagatcttagggagatccttcagaggcgccagcttgaatggagccttaatcaagccccgggcgaagaagtcgagagcttcaacaccgtcctgttgattaccaacgtagcttcccttaatagtgatcatacgaacgacagtactaatcactggggccttgaggaatgcatctgggggcaatccgatcgcaacaattgtgcctcgggagcggacatattctgaggcttgttggaaaggcttctccgagacagccaacaagatcacggcatgagcaccaagaccatcgggagttgcggctttcacgtcggcaacaaggtccttggacttggtaaagtcgacataagtctgttttcgactttgttagcgtccatagaatgtcagggcatagagattcatgatcatacctctgtgccaagcttctcacacatctctcgcttctcctcgcctccgtcaatggcgactacgcgtagacccatggcctttgcgtactgctgtgcaagtgacccgaggccaccgcctgctccaacaatagcaactgtctggccgggacgaacgccggattccttcaggcctttataaacggtgataccagcgcagagcactggagctgctgcatcaaggggaacgcccttggggatcttagcagcattggcggcctttccgatggcgtattgctggaaggtaccatcgacagtgtatccagaaagttgcgcgtgagcgcacagaggggtatcagattgtctgcagaattcacactcggcacacgagctgttgatccacttaattccagcgtggtcaccgatctcaaaggtgttcacgagttcacccttggccacgaccactccagctccttcgtggccaccgaccaggggcatcttgacggggatgggccagtggcccatcatcgcatggtaatcggtgtggcaaacgccagagtagcgaatcttgaccagaatctgatcaggaccgggcttaggaacggggatctgtttgaggacaagtggccctccgatcttctcggcgacctgcgcccattgtgtctcggggatggacatattgatgagatgaaaaggttggaatgagttataagtgtgtggaagattgattctttggtgaattgaggattgtttgccgggcctcaattggagctttatagctaaacatgtcgggtggggatgtccggggtagtaaaaggcggggcaggacctgtcgcatcgattctcatgtttcctaccatctgaggcaattagaccgggctaccggaatgtgtcaacgatgacagaccacccggaatactgcaacgcgtagactgattgggattcagtgtgtatgatccaagaacttgaaatgcaggagaggcaatgcggggaaggtttgcggggatcgcgcacggcccgccatgcggagccgcacgggtagctactgcgattggatagatgattctcaccgaaatcctttttgtccgtttccaggaagatctcgggatcacaaatgacgtcgggactattctggcccgaaaatatggatatgcagacggtcggtggcaaatatccaagaagcttggtgcttaaccctcaaggcatcgcaagagatacatctaacatcttttgactaaatcaacgccttgcaatattggccattaggtcatcatgaataatattggtataatcatatttcgaaatttcaatgttgtacacgaaaaaaaaaaaaagaggatggcgagggggaaagtcccagaaagggcaaatctccgagaatccaacacacagggcccatctctctttctcttccagtcataaaattagcagaaccaatttgcgtatattttggttgcgctagtcagaaaccatggggttcttcttcgatcccgtggggaaagaatgtgcttgaccagccactgctgatagcaaatccggaatatggttcctcttttgcatacatatgtatctttgccaagctggttccgaagctgtcatccagagcgaggcatggcgtccccacttcactatcttcagatacgctggatgacctctctgacgacgtcgagtatgccgcatctgagaagaagggcatgaaattgtcatttcctttaaagatagttccgccacaagcttgatttccgaatttgaaactcgattgttcgtcgaaaaaggttgagtcaatgacttcatcaaagacttcttcaaatgggtcgcttctgttgtctgggatatgtctctcatcgctggcttgttgtctagttatctcgttgctataccccatattaataaggatgcaatagtgctgaagtaaagccagactgactcatagcttgtagtattcaagatattctctttttgatgctgggtttgctgcagggaagtaacaccgcgacacgagctagccttggatgctttcttcgtacctccattgaggtatttaggtggttttcgatgtccatcaacacattgtgacggcatcttgcgcttcacgcattgcccacaggggcgttcatttcctaccgcctttgtcagtttattcttctcaaactacccttgttcgagaccacaaggcggggtatccctgagcttaccgcatgttttatgggccttttggcaatacaagcaggatcttctagcctttctgcgggggcgcgggagctcgaattcagtgcgaggtgccatgttcagactagtcatcttcaatttgtgtagtgtgggatcttcaaggaaggtagataagatagtgtcacgtttgtcgatgcgacgaacttggaatcaggctttatatatacctagataaaaggttcttcacgaaggttactaacaccaagggtcctcgcaatatatggccaccaaggtgtttatcaagactacgttcatcgactgccataacaaatttgaaacgtcattctgagcggctccgcatgtttggccatcctacaacatagttctcacaatggtttagctcccttcaccagatgggaatatcggggccgtccttcagtccaaaataatgcggggaaaatcagcaagaaatgcgccgatcgtaatttcagctgtgcggctccgcatggccatttcggaaccgcatggccccgaactcaacgcgtcaaggcttggcaattggcgatgatttcccagtttcaaatccaccaacatactttttggatcatctgatctgcattccccgcaaaaagactagcaaactccttgtcatatttgtggggtcaacccccggacggaagagtttatttggcacagagtttatgtggcaacttggattcagcgaaggtagcgatcatcaaagttaaaaacctggggacatagcacatcgatacacaacattggttgaccccctgtctattttcaccggttattgtgctcactccccgttctggactcatccggtcttgctgaaaatcgagacatcccacattaaccgtctgattggacgcggtggaaaggaatgtgactgtactctccactccccctgttttacagtgaaatgagtgaatatcaattaccccgtggtgcacgtcagctacaaagtccggggaaaggttaaaggttccacagtccccgcaaattaataacaacgaggcttatctttcagagcttccattctcattacctgctatagtatattcttctactctttgaagaaaccagagagagccatgtcacatcccagcgagaacagaatggacagcttcgccagtcaaaatggcgagtcgaaggccactttccaaaacagggagaacacacaaaatgctctcactacagtcccaacgtcagtgactctgtcagcggaacaatttgaaaggctttatttgagtcctatgacggttcgccaatcatcgctagcgaagaaggttggaaatccgacaccattgtgagtctctgaatactatattctacgcacggcaattttgtctgacttgattgaacatgcagagcactaggaggttttgtcattaccaccacacccgtttcatgctgcttgatgggctggagaggagccagtggaaatggagttgctttcatgtgagaaaaccaatggatcgagagagccccatctaatgaactgaacagtggacctatcattttccttggtggtctgttgttgcttattacgagtattcttgagttcatcatcggaaatacattcccctgtgttgtgtttggcactattggtaagtcttcctatctcatgatacaagcctcgctcactagtccatgttgctgatacttcaccaaggcgggttttggtttgcgtttgcagccacgatgattccagctttcaatgcagccggtcagtttgttcagatatatcattctaccctcatgatatgagtttgctcacacttcatagctccctactcctcgtcaaccaccgatacagctgccgggctagccagcgaaagctttatgaatacctatggtaagggcaaccaagactctcaaatttgaggaatagctctgacgaaaccagcattcctattcataactatggccgttttgatgttcatcttcatgatttgtgcaacacgtatcaatgtggtatacactctcattttcctctcactgctcatggttttccttctgctgtccgcggcctattggcaactaggccaagggaatgcatctgttggtgatcggtgtgtaaaagtgagtatcattctcattatttctctgctattttgactggattctaacccgatctttctcccagggtgctggagcttcgctctttgttgctagtttactcggcttttacctgttgattgttcaactgtttgggtccatagggttcccatgcgttttgccggttggagacttggcagtactttggacccgcaatgaagacaagtgagtctcctaaaaacaatcgaatagttcgttctgacataatacaagagagcgagaggatgttgaacagccaaacgctcgctagagtcgaatcttttacggtttatctaatgttgcttgctggtatgggaagccggctgtgtcggctggctgtctcggatgtgcaagatagcttcaaccttgaaagttcttgaatcagtcagctctatcagccgcagctgttttttgtttcctttgatctcaccaggtaatattttgcgaggcgtaagtgaggcattgttaaaagtcggaggggggtgccgagtcagcttcccaaccctgcgcagattgacttgcgcatacatgtgactacttatcatatatcttagcttgtaaatctaattggtaaaatttttcgtgcattaagaaaaagcagagtactcaaataaaaggatattccgcagatgctccctcgatcagaagcaataccgttgtagtaactcacctcctttcaatcccgataatttcctatttaggaagtgtgaataacctcactatggctacttgctgtcgccgtgaaacctgccgagggagaagggcatgtctcttcataattccgcagggatgttacttggagccaaaactacaatccggtggtgcctgaaaactatatttgccactatttttgcctacaagttaagactcggttctaacatctccgtacaccttgttactccgtacatgtaactatgagccccatgcgggcccatcagtccccacatcgtagatgagtcttcatgactcatccagtcccgcccccggggcctccacaccaatcgacatatagatctcgtcttccagggatcaattaacagcccaaaacaagcttggaaactccaatccgattcccttagtgtaatacactccaaccccttgaactccaattcctcgtgaaaattctgggcgccgtgacactcacaacctcaacctcaaccatgtcaccccccacggccccaatgaccttctatgacatcgctctagcacctcctgtcacaaaatcctcctgctccccaaatccctggaaaagccgctacgccctgaacttcaaaaatgtcccctacaaaacaacctgggtacccctactcgccatcagctcggtccgcggcgctctcaacatccccgcctcgcgcaaattcgtcgacggatccccctatcaaaccctacctgttctctccgacccagctaccgggcgcacagtgggcgactccttagagatcgcgatatacctacaggaacaatacccgtcgtcgggggcgggagacttattcccggcgcaggcactggagttcgtctttgggcgggatttgggactttacgcgccgattgcagaggcgcaggtcgcggaggggcctgctgctgcgtacgcgaagtttaatacgaatgtcgatgctgtgtttagtgcgcatgcacgcctgatggcgcttggcatgccttttgatccggctgttgcggaggagtgcaaggctatgttctcgaagaggatgggtgtgccgtgggaggctttggcgcttggtggggaggagagggaggagttgttgaggtcgtttgaggagactttgggtggacttgcgaagttgtatacgaatgatgcgagtgggccgttcctgatgggaggcaaagcaaactatgcggatttcattgttggggggtggttgcgcatgagtcggggtatgttgccggtggaggagtgggaagcgttgaagggatggcatggcggtgtattcggaaggttacatgaggcgctggaagtgtttgcgcagatggactagatctggataaatggctgggtggtggatgatggatggcgttgtatactacgtattcggcccgatgcacggtttcagaaccttcataattatatacatatacatgagatatctgatagtatgtatggagtactccgtagtggtagttgagatgttgcccagacatgtgttaggcaaattctcacgtgatgtatcatgtgacatagggggttacataagactatttaattgggcgccaaaggataaggacaaacatagcgtctattgctcattgcagcggtatatatcaggccgtaacattcgttagagtaacattccctaggggccacactagaagtggtttcagcaccgaaaaacgaacggaaaagtgttccttgacgcgatctttggtctttaatccatttggccacgaagcctcctttttgtgctaccatggatcgcagaatatcaccatcagacttgaccgactcaaaccgtcttgtggaagataccatgatccatgtatttcgtgtggataacacgacggtagtaaaattatgcgacccaagtcgcctcgccgaggcagaagccatgaggttcatccgctctaaaacttccattccggttccagaggtttataacgcttatgtcgatgaaaccattggccgtggggtcattgttatggagtacattgaaggggaggttcttcgcgatgttattgaggatatggatgacacacggcgccaaaagattatctcggaattgcgaaagttcatgtccgagctacgatcaattgaaggcaattttatcggctctattgatggctcagcttgtgaggatcctgtcttttgtgccgaacagggtgggtttggcccatataaaacggagaacgaattcaatgaggggttaatctgggcaatgaccatcaaccagacgacgaactcctggattaagcatgttgcaaaactcattcgagccatgccatctcatacaacagtgctcacccacgcggacttttctccgcgaaacatcattatcagtggtgagcgggttgttggaatactcgattgggagatggccggattttatcctgagtactgggaatatatcaaggctatgtatcacccggactggcaaagtcgttggatcgaggatgacattgtggacactgtactgaaaccattttatctcgagcatgctgtcatgttacatatgcaacaggttgtctggtgacgacttctcaaaactcgcttcaagatttagtctatctaccgacaaagaaaattgggaatattttgattgttggtaaatcccgaatgtaagtaaatgcatatctcagtcagaaacaatatatctcgcagagtcagagtagaaacagaacctcactaaaagcaaaaggaaaacgagtaaaaatgaacggaaatatgtaatcaattaccgaaaagaatagattttgaaagtgaaaagagcaaaaaccaaaagtcctattttagttgcatggctcgtatggagtaaattttcctgcatggaatgcgaaacgttccaaccttccaaggatgtgagacttggtagagccgcaaccgtggacccacccatggatgggcggcggctcgggagattagctcatccaaaatagccgctagggccacagagagccggcggaccgtgcttagtgttcttcgcgtaatggtaattcaggtattaaatccccaccgcccgggcccaccagggcttggacctccccttgttaattgaatacataactattgagcgccgtgtggtcttccatatttctccttgtcaatataagcttaatgtctcgaaaaccgtatcccaccccattggttgtccagccactgagtggagagcacacacatactatcatctcgcttcatggaagaggcagtaacgctgagcgttttggtcgtgagctccttgtgtcggcaaacctacaaggccgacttcctacagtaaaatttgtctttcccactgcccgcaagcggcggtcaactatactcaagaagatcccaattcatcagtggtacgataactactcccttgaagaccctggacaaagaaccgaccttcaggtggatgggctctctcagactgctgagttcattcgcggcttagtcaccgaagaggcacggattttaggcgaggcgaatcattcaaagattatcctatgggggctgagtcaaggctgtgctgcgggtatcttcgcgcttttaggtggctggcccgacactagtgaaggaaatacactcggggcatttattgggatgagtggatggctgccatttgagcagcaactatgcgagattatccgatccgacgtcaacctagtattggcggaagacaattatcaggagatgcaatcggaagacgactcatccgaggaatgtgaaagtgatgaagagttagaagcagatgtatattccgaacaagacttcagcgacaatccattggacgagagcagcccggtacacgatgactccaatcccttcaaggggctcaaggaagacagcccactgtgtggtgacttcaatccattcgaggaggacgaggaagaagctccgttggtcatccaggctatcaaccacgttcgtgacatccttgctcttcctatgattccaaacaatactcagtcatcggaagacggtgattcaacaagtttgtgtcacctccacactcctgtctttctgggccacggcgcacaagatcctaaagtctctgcgcgttttggtgaaaagatgtctcgtatgctgtcagatagtctaggaatggatgtgacatggaaggaatatcaagggctagggcattggtaccgtgttgaggacgagattgaagatattttgggctttcttcgggatcgtgtcaacctaccagtgataccagagtcatccctagagaaacagaaaggacaggagaagcaattatgagttctttgaattagatacgccaggcgacggattttaaaccgatgattaagtattccgtaaaaaccctcgtactaggttcggaaaggacatgtgctcagaagaagtctgatgctcagtcaaagatcagctctagatacagaccaaattgagccaaagagagaaaccaaaggagtgggagaggagggaactatgatatagcctgaaaaagatcgtaatttctgtattgctgagagacagatgagagtcctttaaactattcaaagcaccaaactccaaactcccctatttactaagatactaattatcataatcactatgctgagagttcttccaatttctcagctatctgctcaacgtcaaggtcacttggccttatttcaatggcctgaacttcaaccttgttgtcctctgacttggagatatctttctctccctccttctccttcgcgatgtctatatgggacagcgtatactcatctggatcccaagccagaactttgctttccatctctttaaccttttttgctacaagtagttctatctcgtctttctccgtgtcacttaagagatcaagtctctgcctccacgcatcctcgacattgtccgccggtccaaagaagcgctgatcaatcttttcccaatatatcacatcgatggcacgggtggtcctcgcggcatatgcaatccaaaagtcaccactctcccaactttctcgcattggaccgagagtcgatcttcttctttcgtagccgtagcgttctcacgatcgatcatcaccttcaaaaatgtctggagccggcgatcgaacacgtttgttcagtcctcaagaccttgaggccagtactccggtgtttcaataagaagccaccaaggcggcgcgtacgtgaactcccaatccacgacgacggtcactttagagtcattgttgacaagaacatttgttggtcggaaatcatcacaccatattttgaacaggcctgtatcgaatgctacccatcgcttggtgagcttaccctcgcgggctagcttgcggaagaggtatctgccaatgaacttgcgtcgacgatcatctgcagactcgattacgtcgtttctttgatggatgagattggcaatgtgaagttccgccagggcttcgaagtacgaagatgctgaggtaaatattgtctcgtagcttggtaattctgactgaggtagggaccctggtctaacgagttcgtttgaattcattgataaaggaaggctcgccacttcccatgtaaagtcgtcaacccgactcaatgatccgatccgagggaagtctacttttgaaagttgcaacagaatgccagctagctccccgtataatgcttgaagagtgtcctcattgatatcggggttaagccttccccttttctcaggtgggtaatttgggatattgagaaggtcgtacatattcgtgtcatgttcgacatattccatggtaatgaaagggcccaactccaagggagactctttcttagaaccgcagtggagaatgaatggcaccgggattgaagtcgcatcatgaaggtatcgcataatgacaacctcgttccgaacctgttcttcgggaaacatagccgcaccgggtaggggaaagcgtatggtggcggcaacacctgttttgtacgacctccagaatgcgatattgtatgtaccctttcccaagagagaaaatcgaaaagggtcggttcagcgtgatatgatgatttccaatggaatgaaagacctgcttagctccttccataacatgtatgtgacggaagatatgatggttccttttctttgtcctgcagatcagcatgcagttcattatgagcagctttggtcgactttgccctctatcgagcaacctaacctcggatggaaacaggtgcatgtactacctgacactgggacaaacgtttgaagaagctattgatgtcgattgtgcgcctaaatctgtatggcgctggggttatgccatatttgatgacgaaagattgagggcatggaaagcggtttgggccacgagcccgaatttgcagtttcaattattcattttgttgtttgaatgttgactagaggtagttcatttatagtccaataccatctcatgctctaaattaagataccatcatataggctgcgtcatttagctatgagttgaacgtatcgatcagaggattcgacgtaggagccacatcatcctgcgtggcttggactattaaaagtctgaaagaaagttatagaaattataaaagcagatatgatgatcaagggataaagaggcacagctagagaagcactaggtaaggataagcaggtgtgaacaaaggaatccgaatccttggatatatacctgcgcaatatttgaatacaaagaattctcgaaaggaagtatgagttgaagagaatggcctcgctacatgaaacgactctgttcagaaattgcgggctttgatgctgctattcttgttgtcaatgaagcaattcccaatctattattggaacacgttcattgaaaacaaaaaccaccaatacctttcaccagactcattattggcattcaactcttgcttctacatcaatggtatgtggcatgtaaaaagaatcatattcgacaagcaagtccctcataatacctggcttcactcagcatatttcgcatcactcgacttcgacattaatccgccaccaattccaaataaagctacttttattttttgacgctataatctacatctacggagaatttcctgacagcgtctaacagcggtgattatggatcatctttcacggctttccaaacgcattcggggaatcgccaaggcagttgtttcgttctcatcatcaatcgtggatcatatcacactgaagcgacggtgtgaaaatgaagattctgatgaaggggatgatgatgattcggattccatcgacattgatccattcgaagcagtattggaaagagtgaaagcgaagcgtattcgtgaatacgtgacaacgattcgcgcgaagactctttcaaacgataagaagaaaattcctaacgttgaggttaagtctcctactttcataggggagcacatttgctatagggtgaagtttgccgacggagttagctggattctcaaagtcccagctatcggaacccctgatcaatttgacaaagacgatgccgagacccttcgctcggaagcattgacgatgatcatgctgcggcgcgagacaaccataccaatccccgaggtcatttcatacaacattacatgctcaaacaagctcaaagttcccttcattctcatggagttcatcgacgctcggcctttggacgaagtctggcatgaccgggaatctccgaaagaagttgtacaggctcggcgtacacgctgtctgcgggatattgctgcagcgtatatccagcttggaaaatacactttcaacgaagataggcccctgcgatttgacgacgaagattgccttataggtgttgtacccgtgaacaacgacccattctcgggcctcagagagggttgtacttctcgtctggacagatgggggaacgaggaggttgagcatcgaaaggggttgcagaagcttcttcggatgtttgtcgactggactccagagccaaatggtgggaaatcattcgttttgtcacatccaaaccccaatattttcaacttccttgtctcggaagatggttctgtgcgggcaatcctcgattggcacggcgcgcataccagttcgccgagtatagggaatgagtcgtatccactatggctgatgcgcgactgggacccgagcgtatatatatggagtgaagagatggaacaggggattcatgacgaggaaaatgtttgggaagactcaccggacacactgaagttctatcaaaatgtctatgcgcaatgtatcgcagatctgcgaccagaaagcgagaatgccaaagtgacccgaaattccgttctctttcaacatttgatgatggcgacgggagacccgatgtttagcttaggcattaccgaaaagatccttctcgaagtcatgaagcgagtggataagaatagcaacaacaaagacagcggaaactcgggttcttccaaagagcatttgacgggcgatcacagttcaccgaatgagacagaggacgcgggccatggtggtattgaagcggacatggatggagaagatgaagacgaattttttgatatttatgaatttctccagggtttgagcaaagacggcctatgtgagcaccgacagaagcttttcaagaaggggtttcaggctttatttattagttagcttcgaggttgcggtgtttgatgtatagttatgcacgatgacttcaaagaccgaagttgtcatgcattattgttgattttgatgttgaaaaggaggacaatttgaaatcagataaactctttttctttcctttgttcctagacactcttgtctcttctctagagtctagttgcacccaaaatgatatgcggttggtacaagagacacctcaggcaggaactggttatccagccacattatgtaatcaagcacgtcagccaatgaaaacatgcacactaaccgatcaagggcttagggctcacctcagtcacaccccactgccttttcgcacttgagcggcttctggacgtcgccctcttcctttgaacatccacctcatccgacaaaatggtgagttccccagcatcccaatatacaactcggaagacagaatactaatcgaaatgtgacgaacaggcgcccgcagcaacaggaggcaagaagcaaaagaagaagtggtccaagggcaagggtacgcaatcaccaaccatgcgatcgtgacgatttcggccgagttcccacaagacacgaacgaaatcgttggacgagctggggatacgcaatagcaccaagaagcaacatttactgacatgtctttcgccctacagtcaaggacaaggcccagcacgccgtcgttctcgacaaggccaccaacgacaagcttcagaaggatgtccagtcctaccgtctgatcactgtcgccacccttgtcgatcgtctcaagatcaacggcagccttgcccgccaggctctcgccgaccttgaggctaacggccagatcaagaaggtcgttggtcactccagcctgagcatctacagtacgttattcaacaccccttatccttcgaaattccaatgctgataaccttcttcaatagcccgtgccgtcaccgccgagtaaacgtctcgtctctcgtcttttctcgcggttttcttttccttgctacgaatgatatcatttaccttgggaagcccggctgggcatgatgcatagtggattaacgtctgactcttgaagggtgtggaacattcgcactcctgatatacgtcagtagtgcgaactgaatcaaaaaatctacaaaacttcatgaaaaggacatgcgtcatattccgtagacttctctcggcctctaccacctacaatttgcactatctacaccgacccagcaaaaacagtaatcctacgactcttccaccatcgcactcctcttcggtcgctgctgctgcgcgctctcacacagcggcaacggctcttcatcaacacctccatcctcaaccaccctcccagcctcaaaatactttgcatgattcgcaaagaatccagtccaccgcttgacagtctcctcaacccgcgctctagcagcccgtaactccttctcacgacggattttcctctgtgcagaagtcacagcctcattctcgacatcctcaaccggcatgaacataatctcgacaccgcgcaagtcgttcgtaagatcttccttaaagcagcccgtgacaaaagctcgcgttgcgtcccgccccgcaaagaagttgtagctcccaccgggtccgtagatcatgcgattttccgagacgtcgaagacggtcccgttcaccgcgacgtacagggggagactggtgtccgtgccgttgtagagggatagttggcttggtgtcaggataacggggccttgctttattgtagaaatggatgtgttagcttgaatcaacatgaccttttcatttttttgtaaaccaaggaccgggattcgcgtaccacccactgcttcaccaccggccaccgtgtataccatggcctgtacccccacagcacggactcggaggaagtcacataatatgagagaccaccgcaggcgacgagtagggtcacaatcacgcggagtatgtctagcaggcttatgccgtggtcttggctggcttcgtcgtttatggagtgctgtccggaggtcggctctttgtcgggtccattgctggactttgacgtggctgttggtcgctggcggagttctgtcatctctcctgaatttgagttgagttgtaagatcagacaatgaccatttggattgttgtcattggagttgcacaggtggagggcttggctgacaaaacccgaggcaagtgcccagctccgagtggacttcgacttatccacaacttcacatttacaggatttggtttgattttgatcgaatatgttttatttcgcaagctgcattcgtcgctaaagatacaagaggcttgaattcatcacgcaacggagaattacacccagctttttggttcgaacgtcaagtttgcctcgatttatttcccgtcatttgcttacagctgcagattccccttcttgggccgtagacccttcttcccagctacgcgagaagacttcgttcagagcgtcttggaaagtacggcagttcatgtcaatcagacctcgcttgtccttggcttcgggattgcgaatcaccgagactagacagaggtatctgtagaatcaagtcagtatagacaataaagatacactttgagagacatacttgttcatctccatcaaatggatcatagtctgatcatgcaacaccacatggctttctgcttcttggatctggtcgcccaatcgtttacgaactgggtgatcccaagagtacaactctgagatgtcgacaatcacgtcaatataatcagagcacatctcatagcaagccatgtcaacaggtcgagtgtcggaggcgatataaatcttactcagaacatcgaagaggtatgtcttttcaaacccacaattgttggcgagggtgttgatgaggttctcaagtgtagataagttggggatcagcttctggatcactttgctgaaggcttcgaagactgagtaatcgtagatagaggtcaggtagtagtgcacgggcgcattctcgtatccagcgtcactgagctcatcggagatgcgctgcacaatgtcctggaacgtgtcggtgcggtactcgtctgacagtccatcgaccttgtgtatgaagacctcgatgttgatcccgggatagaactgctgaacggtcaatatggttcggttgagccgtgccactgagtccaggtagtcatcttgtgcgtcgatcacccaaaccagggcgcccagactgccgaagatatcttcgaggtcaaaagcggactcaaagtattcgagctgacctgggaaatcccagacttggaagtccatgaaagagctgcaaactccaggtcagcggaaagcgcatcaagcacgtctattctttcgaacttactggatcgagtccttctgaatccgggtagtcgactccaagaagagtgtctcatttggcggcatcttatggaataccacactagcaatagatgacttaccactcctagtacacagttagtatctcagttgtgcgagggctagcagagaagacttgccgtcggagtcccattagaagaagacgaggtttaacatcagggcctttggtattaggcacagaggccgatttggcctgagttggcgcagccacttgtctgcttccctgtaaaatatccagaaggcttagctcagcttcagtcttgggcaatggaatttcacgccgtcgcttccaaaaattgagctcacgtcctataaaaggaccatgaggccggctcacgcgggctgccggtgagtcggacatttaatcaaacaaaaggggtatacattttgggagaatggggaagcaagagaaagcttatggttatagggacgggagattcatgattaggggcagggtggaataaatcaacgcatcacatgttggaaaggaaaagggcattgggcagtcagcgaacccaaccaggctagtatccttggaataacaaggaaaagcccgaggctgaggacggagacaaaatgggactatcttgcaacgggcccattataacaggaaccgtgacagacgctccaaatttggaaatccgtgccttgcctttttcagggcacatttggccgcctagacaggtctctagtgattcttccggaaatagcccaagggtccgggaccaagcagctgtctcacaacggcccgtgcatggatgcagcgggacgcggtaactagccgagcttcgccggatgacctagccggggttcgatgtattatagggaatatggtgcgaggggatgtgctttgggggaaagagtttcttacctccattgaagacagatatctggatatggtatgttagaatctgggatatgcattcagaattgattgggtgtacttacggcgcaatttatttgtattgtgcagggataattagaccaacacaaggtcaaatgtcctccgtgatcacaaagaagaatggtaaaagggactagtcgagctcaatttaaggcaaagaccgactgttgacatctgcatgtgcgaatctcgcctgggaatgccgcaaggatcccagttattgactgggatggtggtacggagtcggatatctgcagtcagacctgtatcatcttcccaaggttgggaaattcaattcacggcgggagggtcggctggagcaatcgtcgagtaaccgttatgccgtttgaggagtgcgggggttggagtagctcggagctccgaggcaaggcgtagcgcgatctggcaccgacgtgcaacactcaaaccagcgcggtaggggagctaaaagagtttattttggaaaatgtaaggcttgaattgattcaaaggagtactcatgagattgtgttaaggaagagatgggggaagaggaagagcagaaccgacattcaagacggatcgttatctctgagcttctatcttatcagttctaatctgtcacagaccgcctttactattctgccacatgccacaatcaacttcataactgtcaaagaaaggtacagagtacacgcctctaacctcatttattacgcttggtcaaggctaaaaatgatgggcttcttcgacatgatattttatgcttaaatacattgatagaattgaacagaaatcactttttttatcatcaacaatcatcaacctcgacatcatgcggcaaccatccggtggttgtgtccatgagcatgtttagtcccttttttctgacccagatactcgctgatacgatgcttgccctgctccggctcctgctcttcttcttcctcttcctcttcctcgacctcaaatgcaggccattcctcccaaccatcttcccacatctttgctaacttatctgttttctcgtctctgctcattttcttgttcttcatcaccttctcccacttcttcatatctttatcatctagaagacactcatccagcagagcagtgatcttgccagtgtcaataccttcaccaatgaacactatttcctggcgacggtcgccccaggcaccttggaaatcattttggatggattcccgcacatccttgtcttctggccaagcctcatcggggagttcagcaaaccaaggcccaccgcatccaagagtcagcataccacctgcttggctccattctccaaattgccagggtctggttgtgagccagaagaagcccttggagcggagaactggaccaaaggccgggtggttacgcttattgctcataatgaccgctggatcaggctggtcaaagtcttccactgacccggagtcggagtctgtatccattgcatcttcttcctcttcttcttcgtcttcctccccgtcttcctcgtcgccttcttcttcttcgacttcattgttctggagaatgatgaacttgtcatgaagaagagcaaagaggcggcgtgaatggaagggtcgacgggcagtgtagacgaagttgttgataccgtacctgtaatcgatcagtaaatgattcatgaataaagaactgacaaacttactccaaggtctctggctttggtgccaaccgctcaccattgcctgttgtctgtatcgtcatttcgtgcagactctgcagccacccaggaccagaagcagcacggacgaaatcaaatttgtttgtgttgataatttcccggacatctatttgggagtagtttgactcgaggatctttgcgactgggttcagcagcttgagcaaatgcatgagcttatcgcgggttgcttggtcaactgtctcgaccttattgagaatcaacacatcggcgaactcaatttgatccaccatcagatcagatatagtgcgctcatcctcggggacaatctcttccctcccatagcggtcagataggaactctgctgtgtcgaagctggaaagcaagttgaaggcatcaataacagtgacggtagtgtctaaccgagccattgtgtgcaagccacctaggttcacactatgttgtcaaaacatgtcagcaagcccatcataagcggagatgtggtgaagaaacaatacatttcatccaggatctttcttgcttcctcatcatcattcgcaatctgatcttcagcttccaacatggccgagctaaactccgacgtgaaagtctcagccacttgcataggctcgctaataccagtcgactcaatgatgacatagtcaacctcatttcgcttggtcagagctgccagttcagccagcaagtctccccgcagagtgcaacagatgcatccgttttgaagtcgaataagcttctcggtggtttgtgagactttgtggttttggatgagggtagcgtcgatgttcagcctaatggaacgaagcaattagcttgcatcctatattcttcgttcgatgtggaactcactggctcatgtcgttgacgatgacagcgatccttaacccatggtcaggagacttgaggatgtgtttgaggagtgtcgtcttgccgcttccctacacatggatgtcagtgtccatggacatgagtcaacgttcatacaactgctgtttcataccaggaatcccgaaagcaaggtcacgggcatctgccgtgtcttcggcttttcctccagcggagctgggacattgtaggagaccgagtctgttccagaattgatgaccatcgtgaaggtgagtgacttttatggctatgtatacaaagcaagaaagaagaaagagaaggaaaaatcaactgagtctctggaagttctatggtatcacattatatagcatctcctttcccacggcaccgtctccaagttcctcaccctctcccactgtcggttgcattttcgatgtcgtacaattgtcaatacatgtcctccaaggttgaagtataccagtggagctatctctcaaccaatgaagcgtatgatttcaaatggcgatgataattgctgtgttttaagtggccagcataaatcgcccgcaaggtacctggctggcgccgctgactttcacggtccccatttgacgagattcgttttgaaaagacagtattagggcatctgtgattggtcttttgctggtttctgggctgagtgctcgttttgaactatcgatggtggatgtacggagtagggctaaacgagctaactaggatagagctagaacgacatatttgaatctctaactagcccaaataaaaggatattgacagtataaagcttgaatgttcttcccccatatgattcttaatatcaattaatgcttcagatataacacactcagatctccaaccttctccaaatcgaaatcggcgatcggctcaatgcgcgggccgataacagccaaatcgccgatctgagaatgcgaaattgacgtcgaagaacgtataaaaggagagtcacaccgacagaatggaaaataacattcattatctctattcctcctctccaaaatgaccgacctgggaatctacaccaaacccctagcctacctaggcctcttcaccctaggaaaagccgccttctccctaacccgccaagcaacaaacttcctcctccccagcacgctctgcaaacgctacaactccacaaaagcaaactgggccctcgtcaccggcgccacagacggaatagggtttggcttcagtcaggagctctgcgcgcgcggcttcaacgtcatcctacacggccggaacgtggagaaactcgaccgtcgccgccgcgaactacaggcgctgttccccgcagtctctgttgctgttctcgtgcgcgatgcgcagaatctgactcccgatattgacgatgttgacgcggaggtgcgcgagatcattcatagcagtaatgcggcgatcggttccccgggtgaccctggcaagttgaccgttcttattaataatgtcggtggtgagatgagaccatctacgctccttaaggagtatacctttgaggatgtgcaggcgaccgtttcgcggaatgcgaccttcgctattcagattacccgtgtgctggcggaacagctggaagagaatgcgccaggtcttgttatgaatgtttcttctgttgcggcgtttggattgccgtatatcagtgcttatagctctacgaagggatttgtggattcctttacgaagtcgctgcgcgcggagttcgccgctgaagggaaggaggttgaggttatggggctgcgggttgccgaggtcaaaactgctgggtatgatgtgaagagtagcttgtttgtccctgaggcgagagtgctggcggctgctggcttggatcgggttgggtgtgggcaagagattgtatgggcctatttctggcattggttgcagggcttgtcgtttgagtatttaccgcgctggatgttgatgaagattgctgcgatgaagctgaaggcaatcagagctgatcagggggccaaggcgaagagcagctgatatggtagctgatatgttgtgcctctggctctctacttcctttctatcacaaacatattgaacagtataagatacacgggaaaatattatatctgtaatcaaacacaacagcaactacagtctatagaatgtctagaagccggccggggccttatgacgatcgtctggaccgtggagtcctgcgccaaggtccaccatgcactcgctttgccaatcctttggtgtgaacttatcgacaattgccttgaaggcgtccaaagtgcagaatgtctcatcgccaggcaagtggttctcaggcttagcagcacagccggggataaggacgggctggtcattgtagcgaatacggacatagtgcttctggagagactcgcgagcgctttcggggagggattcgagaggtgcgcgtgcagtatcggagggggtgggtagcttcggtgcggacttaccgagcaactgggaaaggataccaggcttcttgtttgcgacgggtgggttggagaactcctcgagcacgatgccagcgatggaatcggagctgggcgcttgggagaagagctcgactgcaacagaggaagtgaatggaggccatgactgattttggaatccgccaatactggacaggatggctgccaaggtggtgtcgtggcagccgctcatagcaaacttgatagccttgccagtttccgccttgcctgacccggacgcagcggactcactgcgccagccaccttccacagcggtgctgaccatgcggtcaaccacatcacccatgagagcaccaattcccagtttgcggtattcgctgctctcgccgtagccagcaaaccactcctcaaccgcaatgcggtccacgacggcacgagccttcttgtcgtagaactcggatgggagcttagtggccgggccatgggcatcggttgcgttgatggtatccatgattccggaaagacgagggtgggcatcgacagcaaccttaggcgattcttcgggcatatactttgaccaaaggctgttcaagtacgccatttgttccgagtcgttccctgcattcaaatcattagccgtgatccttatcttcatatcccactgataaacccatacatcgtgtagccgcgcggtcagcaaacagccgtgacagctgtcggaatcgcctacaattcccctcgttcgggaagagtgtctcctcattgacctgacgggccacaatcactggcggtgggaagtcaagcgtgcgcgcgctagccgggtacattccccaaaaggcctcttggagcgactccagcgcacgggggatcggcgtggcgcgcagatacatatcctcggaatcggccttgatctgaggcataaacccgagctggtccacgtataaacgacgcagccgttgtccgagcgcatatgtcgtttcacggcccttgtctgtgagctcgccgtgcaagcttcagatcggacaatttagctttactccacatacagatcatagctccaggaacttaccacatggcttcgacgggtcctcccggtcctgcagtaatcaccgactggtcatttctgccgaatgactccattttccggcgccattggaacccattccattccgagaggtctttgctgctcgatgccatctgcaccatgcgtcttgcgacaccacaatatggccagtcttgtcggggtaactgtcagcatgtactccgccgatatcggtattaggaaattagcatacatgggcttaggcctgtctttgggaagtgttagcggagaccgtcggagagcggatttggggtagtcaattgcggcatacgtttgagaatcgagacgagacaggtgtccgttcacctaggatcggttagaaatgctctcaggggtaacattgtaaatgtatatctcaccatgacggaggaactgtagtagttagctatgtttgtcaatgtggggaccaaaacacgtaccacttgcaccagctgcagcttcagggctggtgggtacaggcgagcgagctcatcctgagtataaggctcacgaggaatgagggtggtcatctcgaatcaagtggaagagagatatccagagagatctaagaatctataaaataaatttaagtcaggaaataaacggcccccaatgaaggcggtgagggagcagctgttggagtaggctataccgataagccatccatgttgacgttcattgaattatactctgtgcatttattaaatagaaaatagaagcattaagtgcggagatttattctaattatattcatcagcctctaaacatggggaaggctaggaaaagctggcaagctcctaaggatataagacccgacatatggtctccgcatctcggcaagttcgccgaagcgtactcgcctcggactagtaatctccgaggtgaagaaaagaagaaaactcttccaagctatgcatatttgacatggtataaaagtacatttaggaacaacattcctcgtggtcactcgtctcccacccctcctcgctttcactggcactccagacagatcgagtgggcaccgccgggacatcgctagtctcagtcaatgcagccgcagctgccgcagccgtagcagtagccatttgcttagccaacttcttattattcttcgccttgcgggcattctcctcttcctggcgcatcagtttcacgcgctcggattcctcgttcgccgctcgctccaagagctcgaccagcttctccaacgctggcgcatatgcttgcgcaagggcgaagtccccgaccttgatacgcatgaagtccatcgctcccgcgacggggccggtatagacgccgagcctttggcttgatgtcgtcatgttgatgtcgtcggacattggggcgtcgttgcccgctgattcatcctgggggtcgtcgaatgggatatccgcatctgcgggctcctttgcagctgcatcccggttattcgggaatttgcctggattttgcttctctacaaacgctatcttctggtagcgttggctgaaatgagtgagcaggacagcgcgcgcttgcatgcggcggccaatttcgattgcctcggaggaggtcgagtgccgtttggccctagccgatccgaccatgtcgggttggaaggtggcctcatggataagcacggtcgaaccctgtccaatggcggcaaatttatctgatggcctgcagtcaccggagtaggaaaccttgaatccatttgagaagacaagggagacggcgagcgcacccttgcagtgtttgacacggcaagtgagtatgtctgcaaggccggtggcagacttgagaagaggagtgatgggggaggattcgtccgtgaaatcaacatgaagacgatgacgattaggtagttggtgtgagaactcggtggtgattttagaaccttgtacttcgggatgcgcggaaagagtaagcaacttgtcgaacccgaagttctcgacctgtgagtattcttccaaccaggatatcattgcatcatcagacacaagtgccagccgtttctcctggaggatcttggctatgtcgttttcacgtctagcagccgagccaaatccatccttgaagttctctgcgtgccaggccttgatcacagagaccgttcctaggtggtgatcagcgtgcaagtggctgatccaaatcattcgcaggttctgaagcacttcacgaagttcttcgggctcgaaaactcgcttcagttgaccaagagtattctcaccacagtcaagcagatagtagccatatccaggcacctttagcagtgtggcagagacatttcggtatttagatggaacagaagaaccagtacccagggcgatgatttctgcatccgctccaggccattgtgtccgttgctcgtgcaactttttctggaaagcaggtttagccacgcggctgctaatgacttccattctttgtgtaacagaacgcgggatgctattcaatacattcgctgggttgaagcgggtcatcacatcctcactgttgaacccgaaattgggctccatgttgatgatgaatccgggtacaagaggctgcagtggagaattctggcgagcagcaattgcagattgtgaattggcattaggtgagcccggttggggaagggtcacattgtcgtgaacaggaaccgcatagctatcgcttttcagacgggcgaggcgaacagtcgagctagcagagcaggtcaatgccaggtagttcgggcagtggtctgtgctcgacacggtgtgcttgcagtgggacatgctggcaacgaattcctggaatttaggattctcagccacgcctggtccaagaatccagatgaaggcctgcaactcggtcgtcacggctggtgacttccattcgggccggtttaccaggtcctcgacgtaatcagacgatggcaattccatgatggcaacgccttttcctgctcgcgtctgtcccaagaccatatctggagtgatagtcttgccatctagggattgaacgctctcgcccttcgtcaaagccgcgtacttagaacccttctcaacgttcaattctcgggccttcttcgggtcgaactttccgcggatatcgtggtttcgcacgatatagcagacagcctctttcgagggagaagtggttgggagactctcgatagtagcaccgggccagggctttcgaacgagcaccttgatgtctggcagctcatctgagccacccggcaccggacctttgtattgttcaaggtccttggtttctgggttgcgaatgaatatggcggccggcatcttgacctcagccaatggggtttcatggagggcatccatcttccacgttgagttaaacatatcctgcacaatagactgcgtcaccatcaagttcttagtacgttggtccatatgatctccggtctgttcagattcctggaactcgtccaagctccgctttcgtggactctgtgacaacggctgcgtaactggagaacgcgccgatgggtgaggtttaataggcagagcccagactttgatgttactgtcggaccatgatggcttctcaaagggatcctcggcgccgataggcatttgcttagcgagggtttccgagtcatattctttcaaatacaccggcatgccctttcggaaaacaaaccgtcgagacgtagccagtgtatgtgtaagattcgcagcaccatgaatggtgaggttacctcgctgcgagaccgtctcgccgtcccgctccacaagggcaggggcaggggtcctaccattttggggtgcacggggcttagattttgtattttcttcggcctcccgttccgccctgcgggcagccttctttctttgttcgtcctcaatagccgccatggaagatgccaccgtatcagcaagggtcagaacaatcccaatcaaaccgcctgtgttggcccattccgtccgtccagtgacaaagacatcggtgagaagagatagcttgatcccgcgctctgtgcatgcacgctgtgtgccttctgatacctggccgaagaagtatcgcttgtctgggaagttgaggcaaacggccgtgccgggggtatcggccgttggggtcgtgatgacctggtagaagaatttcatcggggcaattccttctaccggtataggcaatggaacgagttcgagtttggatggttcacaaatcaagtagtcgtcgttatcgggccgtcgtctgttcaaggccggggcttgaagaaagtatgcgttctctttgattgcaggttgtctgatccgaagcggcaaggcttgctcttgcaatttctttttttccgctaattgctccaatgatttagggaaagggatggggctactggagctcggctttgagtcaccgggttttggtgagtcacggcttctggcgctgcgatacgatcgtagggtgaatggcgaaattgaggttcgagagaatgcgcgccaggcgactgcgcgagtggtcgcggttgacaggacaccgcgcacgcaagaggaagccaacttggctagaatgaggggtatcgaaatagaaatttatgataaaaggcgcgcatgtgtagtgatgtcaaggagtaggaaattggtggattccaacgtttagagaaaaaagtgacggtcaatttttcgcatggccgggcagaaaatccatctggaccgccatggagttgttcttcaaataaatagcacaacagatagctcagctagatttaagtgtagatgcgcatttaagaaatacttgtgctattaaacaagtacctgatattcaatttacatgttctagttatgtaccgggttggaacttccaacgcataccattttgacaaagtgacacgcattctatttggctaaactactacaagtatacaggctatgcaataaacaagacaatcatatggccgtaaatatcaagagttgggcttttactccacaaattctttagatacgccagtaaagtaagctccaaaattccatcaagaaggtccctcgtgggagatacacgatatagtaagagacaggcgccttgaaactcccccaggacagacaaaggaaataaaaactccctcccatgattcgcaaaatatggcaggaggtttcaccgtaggtgtatagtcacaaggcaatgacaatggcgagaaagagaatagggctcacatatacaaagaaaagaaggccgaaaaggcaggacgctaatggggaatcactgaaggtgggacgtaacagctgagacacgctcgaaggcagcgtcaatgctgttgcaaagggcgttgaaggttctcttggccgaatcgctgacttcagagctgtcaatgacgagttggaactgagcattcttctcggtcgaaacaccctcgaatgtgaggtcggcagcgggcgcaggagaatcaacaaagagagcaaaggcaggatcggactcatcaatctcaacatcagggttgacaacaccaatgtcagactggctgaatgagtcgctagcagaacgctcgacaacaggagcttcattcttagagctctcggggaggctgaaggaagaagaggattttccggacagagcttcgacatcgagggccgggccctcgggaacctccatgacagcaaatacgggagtgttaccgtagttcatgtcgattcctgagttccagccggcgttgttcatgcccatgctggagtggtccataccctggtttgaaaccatgaccatgttgggctgggggttctgctgcatctggaactcttgaccacggttggcgttcgagtccttaggcatagcctgcatgttgggtgcagcctgctgaacttgttgctgttgctggggttgttgagattgctgttgaggttgagcgggcagggtgtcacccatgtcgttcaggaagttggagaaatggggagatcccaggagcatgcgggccaagtcgttcaggcgggcattttcttcgtaaagagcgcggttctggaggcgaatttcgtgcgcctcgttggttctagcggccacctcactttcgagctgaccaatgtattctggagatgtgttagcaaaaagaacatcacatacgtattcgagtgttcagatagtcatacccttgcggcgagatcggaaagcgcgagcggaaaccttgttccgcaactggcggcgctccttgctgctgagctttttgccctcttcgctagcgagaagacgctcgtcttcatccatatcggcctcatccttccgggccttggccatctgcggcataccattggaagggctgggggagccctcgccattggccatggcattctgtcgcatctgttgaagtagacgagagatacgctcctcgacgacggggtcggggttacggggaccgcggacctgagaaatagcatggcccacttgatccggacgctgctgtatctgaggacggaccatctcaatttgcttttgttgctgtgccttggccatcgcagcctgctgctgatgcatgccagggtacatgcgaccgacttgtgtggacggaccagcctgagccagctcatggcctccgagagcgttgggatcgacatattggctcttggtgccagggtttgcggggtagaagtatggcgaaggattcatggtttcgggatcaatctccatctccgatgggttccggcccggtgcggtgttgaagtcaaattgtgcgtcctcgcgcttcatgtgatgaccagcatacacttcagcgttcacgggaaatacttgaccgttgttgaaacccatcgggacctggctgtaagacatggacaaagcacctggtgggagaccagtctgttgtctgtgttcgtcgtattggtggcttggggcctggtatgctagaggagactggccacttgaggcaaagctggcactgcgggcgtcactggcgctgaactctgtacttgcgaccgatggttggctgaccataaccttggagcgagagggatcagatgtgtaggtgagttgatcaaagttgatgaatgagtcgagatcctggtcgtagttggccactggttgcataggatggtctgcgagagtcgccatggtgatctagataagtgtcctcgtgtgtgtagggggggggtaggcgtaaataaggcgtgagatatggggtgagatatggggtataggggggtataactgagataggttgaacgaaagataaaaaagagggagaatataaagataaagaggatccgaaaaacgaaggtctaaagaaatatggatttggatctagatggatagtgaacctgggagtgaaatggggaaaagggacaaaagtgttccggaatagcaacaggggcttgcgcgtcctttcttagtaagcgggggcctcaggaatgcagccccgtgattggcccaattgccacttgacggggtttgtttaccgtaccgtatcccgggaatgttttcactattttcagatctatatgtaacatacagatgtatacttcagctactatctactaatgagcaatcaattgcttgaaagactgtattttgcgccctatttgatagcctactagacattcaatagtcacagtaaccccctgttaattcttttgccggtcaaaccttccaggtgggccaatctcagggcaggaaccatccgatcccattggccgtcgggcgaaacttgccaagctcggagttactacagcgtatggtattgtaactgtacctttttgtccctgtcatgacgcaggtggctatgccatgggctgtttatcgaagattgtccgctttagtaaactatacattcctgttgacttcatgttgttttggatcagctagagatgcgcgagcatacagtatttttaggtcctgaaacttcgatcttcaaagacaaaaacctactaggcttgttcagactaacggtgactatcacagctagcggcgttcggggctgagccgattatttcgagtggcaccgggtgcgccaagcggtgggctcactctggaaaatatgtacagaaagaatactttgtacactttgtacactttgtacaacacacaatatccagagtacatgacccctgacccataataatactgatgttgtacggagatgtatccatatgcgcagattatgatccagggtgcgccttccatattcccatgtattgacaagaatcccttgtttcaaacccaggatgtacgtacgctggcgtctcgccggaacatacacggccaattgagccgagccctaagtgccggctagaccggtgtgagccagtcaaagacgtaaagtgggagtccggccctctcctgccccgtttgagaatcacaataagctttctagagtcggagcgggtcggccaaaaggtcctaaaggagatcgaacggccatcaagctcggtgatccgtgcacgtgaggagaggagctgttcctaatcgggctagcttgtccgactctattaaacactaaatctctgcctgtcgatccccgaaggatgcccgaggccctgctcataaattattatccacgaattccgaggttgactccgtagaatattcttccatttccaaggtttctatcaagttgcctctttggattgcccctgaaccttaaccaggcgaaacaacacaccgtggaatagctcgttattgcccctttttgttttatcctacccaagaatcaactttcccctgggcctcgactcttcggcagcccgctctggtggtgaacagaggtcatctcgatctatggcactccgtactacacacgacataggtagggctgtttcagattaccattgatccagccgcttagagtgaccgcgtgcaaagaggctgagctagttatgcgcctccgtgcctgaacagccactagcagtagcttgttccttattaaaaatagatattgaaaattttctgcactccgtacggcatttcactagggtcgatcatgccgatacataaacggtgatcactgatttttgagtcaaactagtaagtatttacaatttttgaagtctctgcaggaacgcctctttgtgcggatccttcatcaaactgttttgagtctcgggcagtggatctaggccattggctcgatctacctccacatccggcaattactcccttgccaacatgatatttgcctgaccgttcatatgattgattctcgtggcatggttcgggtacacacgtatgctacctccgctaatgcaatcacggtctagactatttctcttccttctacccattgtctggttgtctgacgccttctacaccctgatctcccggcccttcaaccctcaagaccctacactgtgtaccctgccaacggctccattttctggttgtctgacgactcattccagacccgctcagatttgaaatgagtctgagtttgttcgagactgttgaacgatttggtggagatgcagaaattaaggtctagatctagtacagcttattgtggacaatgagtagaatttggttgtgttgcaactccgatgctcgactggagatcttgatcgatcagtctagactttgtttgtttgggtattgagaacttgacctagtcttacccggtcttctgtgatatggagcagaaatatgaagcggaattgagcacatttacgtgtcgttgtggacttatacttttcgtgttactggcatttgggcgagataccgtagggttagccctcgacgatttagttcccggcgtctattagacgtactgcatcctctctataatttatatctagaaaattaagggctatgtcttgttagatatttacagattgaagagaaagaaaaatctctccatcgactttcattcaactcttttagatttcttatgttgtactgttgttccccaatatatatttctagtttctagtttggttaccataacaacgcacagaatctaaggactatcacctccagtgagacctgtagacataggtacatatacgtacgacctcctataatttagtgaataactcatagcaagatacgagcacaacgatgcaaagagcgacgccaaggaatataaattgccttaggcaccgattcattcctctttcggtccccgaccccataatggctgtcaagtagcatcagatttgttcgtattcgattcgatgactcgataaatgagaagttcaatgtgatcatagtggcgcattttgattctgcaaaggggcttgagcgtggatgccattgctactccatacatgtagttatcttatatgaacccccgcccgaacttcggcaactacttcagatatccaacacttggacctcgcgaaaaccactcaaataccaagaactccaacctgctgaagctatgacatcggccccgacaattctggctacgtgcaagcagacacggtttcatctgctagatgataatccttcgcaggaggtatgggtagccacaacaatgatctagatgcccattaacgttcaaatatgttctgttgacagatcgatgtggagggacttaacatcatagtcacatcatctgcacctgaatccacggaagatgcctcaaagccaaagaccaaaggaaaatcaagggccaaggctgcggggagagagctcatatcagacgcgcacctacgactcaaggcaggcgttcactatgggttactaggtcgcaacggaactggaaagtcaagtgagacagagccccgcaagtactgtctacaaatctcagtatactgatgataccagcgctgctccgggcaatggccgagaaactcattcctggcatcccgcatgcgactcgcatggctattttgcagcaaacagaccagcaggatgacgttacattcggcgaagaccctaatcaggacaaaactgttttggaagccgttctcagcagcgatgaaagtaggaacgaggctgttcggatgacagaatgtcagtatgcctattcaattgggggttgtacttgactaacttgacaagttctgtcgaaaagttttgagactgaagatccaatgcagcccgtgcgggcgatccgtaaaatccggcaccagaaagcagaaaagcatctcttcctggctcacaagaacgcaagcctgaaaagcggtgctcgaggtctacaagcaagaaaagacctgaaggctgccgaggggaagctcgaggctgcatcggagatgtaagttgcattaattcgcgctagagactatatctaacttctgccaggttggcccaggatgtagccgctatcgatgcggagacagtccagtcggatacccaagctgccgttgagacactacaaaatttacagtctcaaatcgaagacgtaagtcttcgtaggatgaccattcacctgctccgctaacatgaaacaagatgaaacttgctgatatgaagcaacaagcccgtcgcgttcttcttggtctcggctttaaagaagacggattcgagaagaaagtctctacgctctcaggtggctggcgtatgcgatgtatgctagccagcgttctggtccaagaccccgacatcatgatcctagatgagccgaccaacttcctcgatctgctaggagtagtgtggctagagaattacctgaaacaactccgcgacacatcagaaacaaccatcgtcttggtttcacacgacagagatttcatcaatgctgtctgcgaggagattgtcattctgcgagatcagaaattgacttatttccgagggaacctgtctgcatacgagcaagatttcgaggaacagaagctctacctagggcgcatgaaggaggcccaagaacggcaggttgcgcatatggaagctagtatccgggagaatatgaaaattggaaagaagaccaatgacgaaaataagctgcgacaagctaagtcacggcagaaaaaggtcgatgaccggatgggtcttcaagtcagcgcaaacgggggacgtttcaagctgaaccgtgatctagtcggatggcatctccacaatcgggctgagatcgacgttccgacagatgaaaagggcgcgactatgagcttgcccgatgcgacggagttgcggttccctgggccgctggtatcgcttgagggtattgtcttccagtacaagaaaaccgaccgcgtcatcctggatgacgtgaacttggttgttcacctgggtgatcgtgtcggaattatgggtctcaatggatcggggaaaacaacgctgctccgtattttgacgggacaggtgtctccttccaagggcaaggtgtcgactcactcccggttgaaagtgggctactatagccaacactccgtggaagagctgcaagaacgtggccgaggcgagcctagcttaactgcgctgggcttgttgacaattgagactgaaggatcgctgaacgagggcgctatcagaggtctactttcttcaatggggttagcgggtcgtattgcatctgatgtccctgtggccaagctgtcaggcggacaactggtatgtgaaacaatgtggaacattaaagcaagctactaataatatcgtcaatttaggtccgccttgcattagctcgaatcgtctggagtgcaccacaacttctgattcttgatgaaatcaccacgcatttggatttccacactgtcactgcattagctacggctctctcctccttcaatggcgccgtgctactaatttcacacgatcgtttccttgttcggtcggtaattgagggcaagcgagataccgagcataagcttgatgaagatttcgaagggctggaggaggaagagaccgaagaaacgccaaggcgccggtcggtctatgtgattaaacaaggcaagatgaacgaacagaagaatggggtggagcagttcgaaaagagcctggtgaagagggtacagaagttgttagcgactatagattagttagttaactaactaaatggctgatgtcgtgcctccatgaccaattattcttccgcgggtgaagatatgatatcatgactcagcacggagcccgccgagaggcatgtgcgataagagacattcccctcattcctccgcggagtatctcattgcatatatatttgcaacatgcaccattttaccccttgaaagaacttcctcatggctggcttgtgcaagcggatcttgtcttgccctagggttgcccgtcagtggggcatacagactcgacttcagagcactcgcgccgcatcaagatctaacgccaccgtcgtccctgaattgcctcctccgcatcccgcaaccgaggcctccaaaccgtcaaaattcaagtccacgaagcccttctccgaattcctcaccgataccttcaatcggcaacatgactatctccgcattagcgtcacggaacggtgcaatctccggtgtctgtattgcatgcccgaggaaggcatagacctctcgccctctgcgaaactgcttacatccccggagatcctatacctatcctcgctattcgtctcacaaggcgtgaccaaaatccgattgactggcggagaaccgacggtccgcaaggacatcgtgccattgatgcaggacattggcaagctgcgacaaaatgggcttcgggaattgtgtctaacaaccaacggaatctcattacatcgaaaattggactcgatggtggaggctggtttgacgggagtcaatctcagccttgacacgctggatccattccagttccagatcatgacgagacgcaagggattcgatgctgtgatgaagagcatcgaccgcattctggaaatgaataaggtcggtgcggggatcaagttgaagatcaattgtgttgttatgaggggaatgaacgaccgagagatccttccgttcgtggagctgggccgcgagaagccgattgaagtgcgcttcatcgagtatatgcctttcggtggaaacaaatggaaccaggaaaagatgttctcatatcaggagatgctggctgttatccgagagaagtatcccacgttcgaaaaagtggccgaccacaagaatgacacgagtaagacataccgtgttcctggcttcgagggccgcgtgggatttatcacgagcatgacacacaacttctgtggtacctgcaacaggctacgtattactagcgacggaaatctcaaagtctgtctgttcggtaactctgaagtctccttgcgggatatcattcgtaaggagaatggtgggagcccgattgacgtggatgcaatgaacaacctgcagctgttggaaacagtacaaaacgcagcgcgccttagcgacgaaggcggcttggtgaatgaacgagaacgtgagattctcgacatcatcggcatggcagtgaaacgaaagaaggcgaaacacgccggcatggcacaacttaaggatatgaagaaccgtcctatgatcttgattggtgggtagccttttgttttttttttcttgatgattggaaacgctttacgacttgtagatcatccatatgaacatttcttttggatctcatggcattggcgatattttgataccatgtatacatgcaattgatgtgtttagacattgtttgaatcattaagctgatagatgaactagataataaaccgccatggaggtcagggtctccctcttggtcttccataccagtacatatactttcgcatctccctacagcttcccaaagtcgtctctaccaccccgggcgctctaagccagagaccacagactgtacttctcgtccatctccctctctacccaccacctcagacaccgacctccctcaccttacaccatccaagaccgtacacatgacacagatcaccgaaaagcccgaaacaaagcgcgtcgccacagccgcctgcaccgtctccttctcaaacgcccgaccctgggaaatcctccgcgaaggccaaaccacgcacaaaggcgacgtcttcagcgtcgcccggatcgcgggtatcatggccgccaaaagaacgcctgatattgtgcccctttgccatcccggcattggtattaccggagtcgaggtcagcgtggaactcgttgggcctgcgggggacagggacagggatcacggcgccatgcatgtcgtggcgtcggtcagctgcttcggtcgcacaggcgtagaaatggaggctatgacggctactatgggtgcggctttgacggtttatgatatgctcaaggctgtggataaggggatggtcattgattctgtccgattgttggagaaacagggtgggaagagtgggcattgggtacgggaatgactcgtgtagttaatttgagtagttgtaggtacttgattgctatgtagtactccgtatagactctttctttaattaaagtggatgttctatctcttctccatactgcaatagccctaataccccttgagcctatctatacccgcggatcagccctatgggccgtttaaattctcctgggcttcaccgtattttcatttctattttttctttcacagccaatgatctttatatgattggcgatatacaactgtagcaatcgttcctcctttctgcattcctctatgtggccatggctcatggcccaagacattttcgagcccacatcactcaaatcggcttagccttgcagtcgaggttttgcaattttccttttttcccttcaaacatatgagaattcttaaaattcctctgtttgaggctattcgtctcaatttgagacctatggggttgtgtgggtgtaattgaaaaccctgcaaaaaaaaataaacctccttcgtttcatcattacatcgacaacgcctcagcggcaacgaggtcagcacaaaaacacagactgtgctttatcaagccctgccgaattttgtcgccgaattagaatgcatgtcttggtgacccgtacgttcgcctgggctactggcgtaaaattcaactaaccgctttatacagttcgcaagtggcggaggaaaaccgggagcgccataatggcagtgctcccgcccttgaatttcttgacgctacactattcatatttcattgcgacatgcataatcgccagtatcattttctatctgacatcgtcgccatggcgtagcgttgcctatgtggattcgattttcatgtgcgtcagtgctatgacgggtgctggattgaatacggtatggactgaatctcatggctatatctcgccgaggctaataacctgaccaggtggatctgtcgactctgaacagcttccaacaagcagttttgttcactatgcttatcctgggccatgctattctcatctccctcactgtacttctagtacgtaagagggcgttcgaggcgaagttcaagggtgtctccgatgagcgggaaaaagagcgatctagccgtaacctctcggaagttgaactacaggccagggaccgagatcccgcccatgcaagctccgggattgatctcctcgacgagagtatcgaaggacacggctgtaaaccacgcccaaagacaaccgtgctggtccaaacgaccccgggagagccatcatcccgtaatgagcagatatgggtggacgacgaccagataaccgtcggcggcacaccccgtcatcatcaccaccgagtcttccccatggctggcatcggggcgagaccggatctgcataaccacccgcgcgacgcagcgcccaatgtgcccttggtcgtgaaggactcggtgtctggtctcaagggaattctccgcggtacacagaagtacatagcctccaagggacttgtgtcccgcaactcccagttccacgatctcactcctgccgagcgtgaggaactaggcggtgtcgagtacaaggccgtctcgttgctgtctgtggttgtgttcctttactttatcttgtttattgtattcggcatggtcggtgtcggtggctggctggaagccaatgatcccgccgtgacgcgcacgaacggcctctcgcctttctggacgggtgctttctttgctgtttctgctttcgtgaacagtggcatgtcgctcctggacgcgaatatgactgctttgcagttgaggtaggtgctctagaccgcccgtgtttcaatattcaaacttgctgatcttctctagggcttacccacttctcacaatgggatttctgatcctcgctggaaacacccttttcccatgtttcctccggttcattatctggactatgagggtcatgcttccggatcggccgatgtggcagtcgtggcgcataaccctggattttatcctggagcatcctcgaagggttagtcgttgcattactctaatagcttgcaggatatagacttatcatcaagcaggtctatacgaatctcttccctgctcgccatacgtggtatctactcggcacgattatcatcctgaacggtatcgactgggcagcatttgagctattgtccattggaaacaaggacattgagactcttcctaccgagtaccgtgtgttggatggactgttccaagccctaggtttgtcaatcaatatcagcaacagcgccatatctgaaccagctaacaacttatctcgaaagcggttcgcgctggtggattctacgtcgtaaccattgccgatcttcgccaaggtctcttggttctatatggtaagtgcttcggtatccttagtctgtaatatcatgctaacaaaacctctagtactcatgatggtaagacctactagtatcacacccatacaccaatcccaaactaacatctcacccagtacgtctccgcgtacccagtaacactcacaatgcggtaagcaccccccgaacccaacccaacccacactagagaaaccacaatctaacacccacccagcaacacaaacgtctacgaagaacgctcgctaggaatctacgcacacgacgaatccccagactcaccggcaaacacaagccgcagcaacgtagtaatggacctaatccgacagcacctcggccgcccaggcccatcggagacatcgcgcggctacttcctgcaccagcagctgcgctcccagctcagccatgacctgtggtggatcgcgctggcggtgttcttcatcgcgatcgccgagtcagaccactacaacaaccagcctgtggcgttctccaccttcaatatcatcttcgaggttgtctctgcgtacggctgtgtcggtgtgagtcttgggttccccgggaagaattactcgttctgtggcgcctggcatacgattagcaagttgattcttgctgctgtggctttgcgtgggcggcatcggggtttgcccgtggctattgacaaggctattatgttgcctagtgagtctttggcttgggcggaggaggaggatgctgctatgcggagggataggtctagggcttgggctcaggagaatgggcctgttgggtctgtttagatggtgatttttgatatacccccttttgtttggccattttattttttagactgtttccacggtgtgtggatttatgagacccatgatgatatgacattttgaagataaataattcttttgtaggactgagtagctacccatggtgtatcctggtaaacaaagtagacatatgcaataaccgtgtgaagtagatggacatcatcggggacatggacaaggagatatacaaattaaccaaaaattagacgatctactcgtcctccatctccagctcgtcttcatcttcatcttcactctcgatctcgacttcctcctcgctttccaattcctcttcaccctcatcctcgctgccatcgtcactgccagcaacaccgcccatatcctcatcctctgcatcattcttcttcgcctcctgtctccgcttctcttcctcgatacgaccttcttcgaggacagcagcacgctcgtcacgcagcctacgctgtgtcttaacaaacgcaccgacaggagtagtctcccagtcaacatccttgaggaaagactcgacgctagagcggttgcggggagcataggagacgttcagacggcgctcctcgatccagcgggcattggcctcaaccttctgcacgagcagcaagatcatctggttgaccttggcgttcttgtttccaccgctgcgggcagagatctgcttcagccagcgcttgagggagacaatgacgggcacggacagttccgggaacgcaatgtgcttggaccacaggacgaagaactcggaaaggagttccgtgacctgctcaccgatgccgtcctggtaaatgcgcgagcgcaggtaggatttaggcgcgcggatcgctgtgttgaagtccaggggcttgagcgtgctggacttggcgggcttgcgcatctccgctgaggtcaggacctcgagaagggaagctgagagcgggatataggtgcctgtggcacgggagatgcggagcagggagcgcgtcaattggaagcgcagggggaagtacgtggcggtggggatgaggcgcatggcgcccagggtgatttgcacgacggggtagataaggggacgcagagcggactgcttgccgatttgggcctcgacaaggccatcacagtgctgtgaaagcacacgggaccagaagtccagcgagtgcacgtattgccagttgtagatggtcttgtaggactccttggaggtgtgggtgatgctcttgcgcaagtgcatagcaagctgacggatgaaggagaatcctgctgtgtatgagacgttctggtcaatgccccagatttcggctgcggagttcttcatcaagttcacgcctgccagagtgtgcaccgttgtgttgcggctgcccttgacaacaccctcgtaggtggccttgagcacactctccctgatacctgcatctcccagaaccataaggcggcggagaatcaagaaacctgtgatacgggtggcgtcggccgtggacacatcagaccaaattccgacgacaatcttgaccagtgtcttcagcaccttgcggaactgaagaaggtaaggcagcatgggctcaattgacgccagggtcaacttgagtgtcgatgcatccgacaagttaatcagaagctgatgaactgaagcagtgtgcgatttgatcagcggtgtgagggtcttgaatttcttggaatccaatgagaccctgatcttgccagaagcgctctctttgacggggagatgatgggccaggaccttggggatggtgttgagggccgtgataagaacctggtggtacacgttcttgtcggagatggtgtatttttgctcgggggcatcggggtcattgacataggcggccgcacggaatgcgagcacagcctggcgcatagctcggatcgagttttgctcctccatcaacttctgccacttcttgaccatctcaatagtcaaggtctcatcctcgggctcctcttcttccttcttcgacttcttcttcttcttcttggccggctcctcgtcttccggttcttcgctttcgctcagagcgtcaacctctgaaagatcgccttggtcaccgaaatcgagcagttcagaatcgttttccttaagatatttatagaactcggggtccttgtccttcaatgactccagctggtctttgtgctcgtcataagcatcgacactgtctgcgtcgtcattgtcactctcgccctcggacgcctcagcgtctgcctgtgccttgtcttctgagcgcttgcgcttgccaatcttgggggtggtatccttcttgctcgccttctttcccttctcttcgggaatatcgaagccaccagcgaagaaatcgtcgacgttcatttcggaaaaggcattttccttcttcaattcctccgggttcttctctgcagcggcttcggcttcggcgcggcgagcagcacttttttccttgcgcttgtcgttcagttggtgtctctgcttgatcttggcatgcgctttgcgtcgctcaaggacatccggcagacggttctgcacgaacttcttggtcgattttttgccgccaaccattttgagagagtaatgcagaaagagtctgcaagtgtagcttggtcggaaaatggctggtcaaaaaaaaaattggggagaaaatcggcgggtccacctttcagaccgcctttggcatcgagcgataacatccaggcaatctacaagacaaccttggaagacaaccttcgattacgattgacgattgacgacttacggttattgtacatagcgagaatttatcaacaatgtactcacagcgcccactttcttatgcgccgaccccctacagctacacacccaatcccgcccggtcggccacaatcaacctcgatgaagtatgggtccttgtctccgcattgatagttacattgactaatgccactttcttaggaagtaaaactagcatccagtgcagtcgagcgcgacttatacgaatcactagccgaaatatacagcatcattgtcaccctggatggactcgagaaagcatacatcaaggatgtggtcaccgaggcagaatataccgagacgtgcacacggctactgaagcaatacaaatctagtattggagatgagacagtatcgcgggagtttgtggatctggaaaccttcaaacggacctggggggtgagtgttgctctccattttaccccgcaaactccgatgcatctctgacatatgtggacaatatagctagaatgcccacgagccacagagcgattgcgcattggtcttccagccacagttgagcaagcgtctcacggtggaccgactcccagtatgggtgcaacggcgacaggacaggctggcggtgcctcgggtagtcttattctggcagcaaccgaaaacttcatcaccttcctcgatgcattgaagcttaatatggtatcgaaggatgcactgcatccactcttatcggaggtgattcagtctgtgaacaaggtaacagataccgatttcgaagaccgcggcaagatcattcagtggttgatcgcattgaaccaaatgcgagctacggaggaattgagcgaggaccaagcgcgtgaacttgcatttgatattgagcaggcttatcagggcttcaaggctacgttgaactgattgggggatcattgacttggtgctccggcaaggcgttccaatggacggtagaaataccatttcgttttgatgtattgacatgttcatcggtttttgctagctaaatatacccactctggcttgtttttgattgagtatccttgtataagtacagcgatttcaggcatctactactgtgtctcgaagagcatctagcttgaagacatacggtgttcggactaacctactctatttcccgtccgatatcaactgtttctcactcacagcagtcttcatgtcattcctgttcttctgttgatacattgatgcctgatagttcaggcgacattcaacccgcggaacggcagcgccggcctttcctctttgggaatattttcttttttctccgccacaatttcgtcgagttctcctggctgtgaggtcaatttgttgattttcattcctctccggcaacacctagagaacatacagttgtcaccatgatcagtgccacagatgagcctctacatggttagttcacaattagcccctctggttcatctggtccacaaaagataatggaactgataagcgcagtgcttgacctcccgcaagtctacgagaagccctctggaactgatctcgtgaaggctttggctctgttgagcttgcagccacgcacatttggcacgaccgctgatgtcgtcaaaggccctgtagtccagcctgcaggagtgacccggtatctcacatccatcatcgccagtccattagcatggctcgacaacgatgaactccgaggggcaatctgggatgcggccgctgcacgactaagtgaacggtctggtcgaaccggtaaccaggcgatctatccagctgtgttatgttatcccgctgaccgtgactcattcgttcccagctatgccggcaatgtctcgaatattcaccgtgcccacctcctccggcgaagaatacacactgaccctccacgaaccgtcactaactgcggataacctcggtatgaagacctgggtatcttcgtatcttctctcacgccggcttcacaatcttggatcgccgccagcacttgtcacctcctcggctactccctccacattgaaaccccagaaacctctgcgggcactcgaactcggtgccggaacgggcttggtcgggctttcctttgctgccctgcaaggcgagtctgcaaccgttcacctcaccgacttacccgagattgtccccaacctcgctcacaacgctgccttgaacgtagaactcctcaacagaaccggggcgactgtaaccaccggcttgcttgactggtctgtcacaccgtcgccccttccaattgcggaagagcagtttgatgtgattctcgcggcggatccactgtactcgcccaaacatcctaaatggttggtggacaccattaagccctggcttagccgtgcgcttgatgcgcgagtcgtggtggagatgccgctacgagatgcatatttgccgcaggtgaatgagttccggcagcggatgggcgagttgggcctggctgtggttgaggagggcgaggaggtcggttacgatgactgggagagtgcggatggaggcgcactggctgtcaactgctggtggtcgatttggggatggagtgaaaaggtatagtggcggtactaccaggtcatattgggaatggtgaccaaacgaaatgacgataatagacgatacacgatatattagaaatagggattcctatatacatagacattggttattgagcaatgcaaaccttggaaacgaatttctcgtttcactttttagtagaatcaacttgatgaaccaggaacattgttggtcgttggtaaaagaggagctgatcatcacgtggcgatgacgtcgggggcacatctcatgtccagtggacttctaccttgatctatgtttctaagattcattaataccaacaagaagaatggcttatttttatatccattcacagagaacagctattctctatacccgtatggtcagtcaatagcctagcgtcattcaaatcaagcaagtcatgctaatgcgacaacagagcatagtccaggctccagaccaaactgctacaacagccgcgaattcctgaaatctgatatatcaagctgctattgatagccagccagatctaacgacgaaaattgcaatcgcatataccaccaaacatctgcgcaatgattggacttctagcccttacctccatcccaacggtgacaggtgtctccctcgcttctagcgagcagcgcaaagcaaaccagcgcaaagaagatgcacgtcgcatggtgaagttcaacatcgtagcagaatgcgatggcgacacagatgatgaccgcgaattgaacggcatgactgttgttgtaagagacgagaaggtaagtaaatccaatgcaaacaggattaaaagtctacaggaacctcacaatccctccgaataatattttaatcagagctcaaattaaagaccacatagactaacacttttaccctccacaggtctacctcgccgacccagattcctccaaacggtccccgccagctttcacagccctggccttctatatcgagtacccagaaccggaagaattgaaatatctcaagcgcgagcgtggcctcggcctgccgacttacgttcaggacaacccgccccttcttaactggatctacgcagataaggaaacgcatgagttgcggtacgggaatcggtcgcagagcgtggagcagctggtcgagccgtgggactggtgtaagaatgagaagtacattttgctcgaaaagaagcagaatgctttcattgcggttgaagaggaggagggtcaatgggcgcttcattatgatcgggatggcgatgagcttgcgcgcgttcttgaggagcagggactgttggattgtgcttttgtgcctgtcaaattggtgaggaaggttgttgaggagaagccgccgccgccgccgccgccacctcctgctgctgctgctcaggctgctcaggctgcagctccccaggttcaggggaatggtcagagccagaagtagatggattgggagctggacaaccgttatgattgagccggacttttttgtgtatatacttgatgagatgacttaatgcatttatgattcgatcatgattatgggaataccacggtagtaaccttggaatattttagtgtacagagaaaaattggacatttaatcatccagtccagcccagctaccagtgtcgctgacgttgccactaaccgctgcggcagccttcctgttgcgactggccgcaatagcaccccttttgttattctccatgcgacgttcaaagccactcttggtactaattctcataccacgggcaccctttccatcatcctccttatcggtcaatcttggggcctggcgcgccttgacaccatgcctcttcatatccttcttgctgttcttgcttaggttcggcagagcgtcgagcagccatttctggatggacttctcgccctcttcgccgccgcgtagcttctcgctgacgtcgatgatgttggcaatgctcttcacgtagggaatgtcttccttagtgtagtaggtgacagcgataccgccctcgcgaccagcgcggccggttcgccccacgcggtgaacgtagacggcggctgagttggggatatcgtagttgaccacgccattgataccgcggaagtcgacgccacgggctagcagatccgttgtaaccaaaatccagatctcgcctttgcggaaatcgcgcatgatatcggaacgttggccatctgagagatctgaatgaagaaccgcaatacgtgaggatccacctgcttccgcggggatatcgtatttgagttcggagtgcagagccaccgcacgaggaatggtctgtgtgaaaataaggaagggagggcggaggcggatatctgaggctgaggctgcagccgggcgaagaagttgacgaagtcccattagtttaccttgttctgttgctgcgtacacaagtttgtggtcaatgttggggattgcagagtctttcaatcctacaaccagacgaagtagtggatgtggctcgcttggcttttgtcccatatcttccagtcgctctctgatggtcgacttggtgagatcctcgatattggatcccatggtagctgaccaaaggccgacacgcaggtcgggatgtgagcacgctttccagatatcgagtgtctgttcccggaacaatgggtccaggagaacatcggcttcgtccatgaccagactccgcactagaggtaatgttgccacggtggtcgtccgattcgcagatagagcattaaccaacattagaggtgtagtgacgagaatatcactcttggtgaccgggatgttggctcgctcctttgctggcttgctttcggcaccttcatcttcggacccggatgattcttcgctgttctcgtcaagaacattgccatcaccattatctccaacacgcataccctttctcataagcgtgatcttcacgccagttccagccactagcttgcggccctcgttgacaatctggcttgcaagctccctggtgggcgccacaactacagacaaaataccatgctcgtccgggtttgagtggtggtgtcgaacaattttgttgatcacagggatcaagaatgacaacgtcttgccgctgccggtgggagcaacgaccagaagatctggctcggaagactctccaagaagcaatggaaggcttccaagctggacctctgtaggtacggtaaaaccttgctctgcaacattctctgcaagccgcgaggagatcttgtatttggaccgaagttccttgaagttaagtagaggctccgggaacaagcgtctggcacgcttctgctccttcttactgagagtcggcgcctcttctttctttgacttcttcttctttttcttggactctttggtagacgtaggctggacttggatctcttccaagtcgcgcatgtccgtaaccttgatcttgtgtgagttcaagatagtgcgacgctccacttcatccatggaatcgtcgtcatcggatgcggcatcctgagcagacactttctcagcgtcctcggtcgcagcagcggtttccgtcacactagctgcagggcgcttgtttgaactgaaaaagtcgagttcagggacatcttcctcgtcctgttggatggcagcgcctctctttctttttttgccattcttggcagactcgagcttgtcggtctccgccgtccggaaaagctgcgggttagctgctttcccggtggatggcagacgagagtccgaggccgaggaggtaggctttaattttgttgacctggtcaacaatctgaacgcatccatatcttttgtggttgagtcgaaaatgtcgatgatattctgaaaagaaaaaaaagtggtccgccgactttcctcccggaccaatcagcgttgagcgttatatatggccgccgccgaggaaaaataacaagaggataaaccacagatgaagtgtctgaacataagacatatatgatatcaggactatattcatacctaggggatccgggtcatgattacagagaggtgtgggaagaataaggatagccgaagtcaataaacctttagattacagtagcttttagagcacaaatagcacaggaatgaattgcaatgacaaggtctatctcagacaacagtttaaattccatcgtctatcatacacagcgcgggacgattaacatatgaaagaaaggaaaggacgattctcatctatcgacatccatttagtgcgcgtgcgcaggctcgccacggtaaccaataatgttcatccgaccgatcatctcgccaacagtgaagaagccaatgacctcagcggcagtgacaccggcgagggcgagctgcttggggctggcgttgcggatagaggcgaggatagacgagggggaggggagggtcttgagggcggcagggttggtgatgaaaggctggaagtaggactggaaggtggccaggttgctaggaggaattgttaggtcgggagtaaagaatcgagtacggggtccgacttacggaggagccatgttctggccacggaacaccagtctgccgagctcaattccgaccttggagtagtagatggtaggagggatcatggctattgattgacggttagttgtgcacgttcgcgaacgtaacccgcggattgaggtcaacaaggaggttgggactgggcgccacgattccaaccggatcaatcggtcaatcgttgccttttttcttttaataagtacccaatgtccaacgctcctttgtagccatccggacgggagaagaggagtgtcccttacaatcgacgaaagagatgaccttgccggcgggtccaccgatcttgcgcagggcaccagcggcattcgcgagggcagggccagcggaggcagagaccttggacagacccgcagaggccttggaggcagctgaggaagcagcctcaccagccttagtggcagcctccgaggtggaagaggcgtgtctgacggcggttctccgggtcaggaactgcgattgccgcaggacggcacgggtgacggcgggcattttgaatgttgtggaggaaatgagtggaaaagaggagggaagcaaaggacacccgaagcagttgctaataggagggcagtatgatctaatgatctggagaatcgcgcaacggagaaccagatgaagatttgacgctcgggaacttcaggaattacgggtcacgtgagtcgccgtttatcccaagtaaacaatttacttttctggaatataaatttggaggagatgtaaggctttatggatttacttttggatattgaagcgctagaaggtgtcaacctgaaagtggatggtaacctgagcaccttgttatagcattgtacattcatacctacatccggccttgccagtcgaatcacaaccggcacttcactccggatggtagaaataagttgataatttttttccttctagacggattgatgaatatatgggcttctacggtgtgataaatgctccgtagatttaattttcaaaaaaatacgcacatcgaagccattgtaagccaaaatatataaacgcaatattttgtatggagtatagatacactaattgttccaccagtcagtaagattgagtccagatttccaaaatccgatgcaattaatgcatcaaggacaacagataaatggtatattgagcaaaaaaagcgagattagagtggaatttactataagaaaaagcgactagcgacctataagccagagagaatggtccaaccaacatagaagctacccagggaagtatcagtataaagagcaaatatactaggggcttatgcataatgctacagcacttaaaccataaatctgttagatatctacatgcatagctgcctcctgtattcttcatcgtcaccttacaattgtgacaccactagacaaccgtagtagtcggtccaacgaaaaatagcacaggatgagcctagggttgaatttgtctcacacaatactacctccatgtaggtagtgaaataggaagagttgttacgcagctcctcactgcctatgatatatccgagaaattgattgctagatcctggtaggcgcgtaacacgaagcatgcagagattcgagtatggtgagacaaattgtatctacctatgcatgttgtacatgtagacatcgtatatagtagagactttcatggatgtaaagaatagacattgcctgtggctgtaaaaaggtttgcactgtttgtctcggaaaaatgaattcatctccgccggagaattgcctctcttgttgatgcaatgggttctcaccttgaccgcattatttacttgacccagagacaccccagattgatttctgaaccgaaccaagataacatgagaaaatagccctggaggaaatcagaaccgggagccttcagcacaatattaaccgatcgccgattaacattcggcccgagatcgagagcgggcaaggattgcctcattcagacggaaaaagcagttggacccccgcgcggttaaatcgaaagcccctccactccacttttcgctactccatatgtatcaccgtggggtgaacaatatgagatcaccggacattgatgcggttcgagtattaaagtggctgtttcctcgcatttaggcatttgttctccattttcttcctctcccctctccctctccctctccctctccacactatacaatgacttccgcaacaactgtcactaagaccaacatcggtgtctacaccaacccaaaccatgacctctggatcgccgaatccaacccgacagtagaggacatcaattctggcaagggcctgaaggctggcgaggtcacaattgaggtgcgcagcactggtatttgtggatccgatgtgcacttctggcacgccggttgtatcggcccaatgatcgtcaagggcgaccatgtcctcggccacgaatcagccggccagatcattgctgtcgcccctgatgtcacccacctcaaggtcggtgaccgcgttgccgttgagcccaacattatctgtaacgcctgcgagccctgtctgaccggccgctataacggttgcgtgaatgttgctttcctctccacaccgcccatcgatggcctgctccggcggtacgtcaaccaccttgccatctggtgtcataagatcggcgatatgagatatgaggacggtgctatgttggagccccttagtgtgtccttggcggctatcgagcgcagcggtctgcgtctcggtgacccgctgctcatcactggtgccggtcccatcggcctgatcagtttgctcagtgcacgcgctgctggtgcctgtcctattgtcatcactgacattgacgagggccgtttggcgtttgctaaatctctagctcctgaagtgcgcacttataaggtggaaattggcaagtccgcggaagagtgcgcggacggtatcatcaatgccttgaatgatggtcagggttctggccctgatgccctgcgccccacgctggccctggagtgcactggtgtcgagatcagtgtcagctccgccatctggagtgtcaagttcggtggcaaggtgtttgtcatcggtgtcggcaagaacgagatgaccattcccttcatgcgtctcagcactcaggagatcgacttgcagtaccagtaccgctactgcaacacctggcctcgagccatccggctggttcagaacggcgtgatcgatttgcacaaattgattactcaccgctactctcttgagaacgctctcgaggcctttgagaccgctgctaatcccaagactggcgccatcaaggtgcagattatgagctctgaggaagatgtcaaggccgccactgctggcgagaagttttgaacgaagagagtaaaaagatgagcggtatctgagagcattagtgggtttctggttggggtcaagagcggccgttggcgttggcgattttctttctatattcacgaatgatgtctagaggatgccattgggtagaatagaaagcacatgaaatggctatttgacataatctttggtcgatgcgatgaagaaggtagaaactgtagaggcacaattgtcaatgtaacagatggggaccttgcaagtcaaccaagtcaaaccctcccccgacgtcattcccggcaataagccgggctaatactggggaaataacagcaacaatcaaaaatggggtaaaaaatggaccctgcagcgtgaatccggagctactggagctagggtaccttgtataggcccgaaacccggggatggcgcacagccaagagggaccgtccgataattgcccgtctccccgcgcaaacgtttgacgatgcaactgagcaatatgtcaattccagctaatcatgtggaaaacaaacagttttctcgcgtatccccttgattcatgttgcatcactccccaccacccctcacttcagatcccggccactgcatcctttaaaaggtgcactgtccctcctacatcttgagtgtatcctgctgtgctcatcttgtgcttcttcagtgctcgcccgattttaaacatgaaaggcgcactgcttttcctggctcccctcgtgggagccgccgtcctgggatcgacatctcagcttgaccattgtcctggctacaaggcttccaatgtgaagcagttgggccagacattgactgctgaccttagtcttgctggagatgcctgcaatacctatggcactgatcttccaaacctgaagctcctcgtggaggctcaaactggtatgcttcttcatcattcccaagtgaatgtatactcataattctataagaaacccgtctccatgtcatcatctatgatgccgatgaggaggtctaccaagttccagaatctgttctccccagaccctcgagcgcaaaaggtcaccaaaaggagcccgctcttcgcttcgacttcgaagagaaacctttctcattccgcgttctgcgtggggacgaagttctcttcgacactactgatacaaagatcatcttccagtcccagtacttgaacttgcgcacttggctccccactgatcctaacctgtatggtctgggtgaacacagcgattcgctgcgtctacctaccacaaactatactcgcacgatctggaaccgtgacgcatatggcatcccctccaacacgaacctttacggtactcatcctgtctacgttgatcaccgcggagagaatggtactcatggggtgttcttcttgaattcggatggaatggatatcaagattgacaggactgctgatggcaaacaatacctcgagtacaacaccatcggcggagtccttgacttctacttcatggccggtcctactcccaaggaagtgagcgagcagtactcggaggtcgttggccttcctgctatgcaaagctactggacgtttggagtatgtcatttctaacttgaatgttttgagaagtaatattctgatcagtattcctttagtttcacaactgtcggtatggttaccaggatgtatttgatgtcgccgaggcagtttacaactacagccgtgccggaatcccactcgagaccatgtggaccgacatcgactacatgagtggtcgaaaggtatttactctagacgatgagcggttccctctagagaagatgcgcgagttggtttcgtaccttcacaagaacgaccagcactatattgtcatggtcgatccggccgtcagtgcctctggtaagggataattacttgttcccctctcacttctgctctaaccctgtgtgttaccagataatggtgcttacaaacgaggtcacgacgagggtgtcttcctgtaccgtgacgacgagcgtagcgaactctacaaaggtgagtttaccatcagaagcacaattcccaccttcctaacgtaatctaggcgtcgtctggcctggcccaaccgtctacccagactggttcaacgaagacacccagaaatactggaactcggaattcaagcgattcttcaaccccaaagacggtgtcgacatcgacggtctctggatcgacatgaacgaagcttccaatttctgcccatacccctgcacgagcccagaacagtttaccaaggatgacgacttaccccctgcgcctccggcagtccgatcgcctccccgccagatccccggtttcccggctgatttccagcctgggtcttcctcctctggggcttctctgtcgcagcgtgtgaagagaggtgatgttgctgtcgagaaacgtagcatcaacgagaaacggagccagggtggaaagggacaaaagactggcttgtctggtcgcgacctcattaacccgctctatcagatcgcaaacgaggctggctcgattagcaacaagaccattgatactgatctcattcatgctggcgagggttacgccgagtacgacacacacaatctttatggaactagtgagtcccctgtgtttactatcaataacctttctaacaataacctagtgatgagctcggcttcccgcgaggcaatgttgaagcgtcgaccccaggtgcgacctttgatcatcacgcgtagcacctttgccggagcaggctcccacgtcggccattggtaatatcaacaaatcccaaatcagtaccatagaatatgctaacccaatcccaggctcggcgacaacttgagccaatgggataaactgcgcgtgtccatcccgcagatgctagccttcgcctcgatttaccaagtcccaatggtcggcagcgacgtctgcggcttcggcggagacacgacggaagagctttgcgcgcgctgggccatgctcggcgccttctctccgttctaccggaaccacaactcgctcggcaacctggcccaggaattctaccgctggcccgttgtcaccgaggccgcgaagaagatcatcgatatcagataccgtctgctcgattacctctacacttcgttccaccagcagaccttgacgggtagcccgttcctccagccgctcttctacgtctacccggaggacagcaagacctttggcaacgagctgcagttcttcttcggtgattccattctcgtctcgcctgtcttggatgaaggcgccaactcggtcgatgcctatttccccaaggatctgttctacgattggtttaccggtcttgcggtgcagggcgatggatccgtcaagacgattaccgatctcgcggttaccgatatcccgatccacatccgtggcgggagcatcatccccctccgtacggagagtgccaagaccacgacggaactgcgcaagcgcggctttgagattctcattgcgcctggtgcggatggatccgcggcgggtgagctgtaccttgatgatggcgagtcgatcgaaccggctagtgctgcagagattcagttccagtacaagaatggcaagctcaagatcctgggccggttcgggtatcaccctaatgtggttattgaggctgttactctgctcggacagaagaataagcgtcgcgacgttgaatacgatgctcagagacagagcattacaaagaaggtcgacatcaagttgactggacctgctgaggtgactttgtgagtttcctacagtgcatcggtgatattaggaggaggttgaattatggatagtctttgaggtagtcgggctctttttttagaaagtgggatccatggtcgcctggaggttatttttccggggccaccacattcttccaaggtttcggtaccttgtagtactccaatgccacgttttactcaagtttgatcttaatttaggggtctcagccatggatcaataatgtgtgttgtaagcgagtattttactcggcaagatgagtcgacacggtgattggatagattgagtaatgttcctgcatgctagccccatagccaaggcgagttcatagccaagcagacgagtgagttagcaattgtgtaaatatgactaataattcagggtctgaaaggcaaccccaaaccaataaccccttgcatgaccttgcatgagaggaggtggaggttaggagggagaaagacactgcctggatacaatgaaattactctttcaactctttcaactctggaacccttgaacatttgagagacaagaataaatccatcgctattctaccaatgaggcaatagggctaaatcctgccaggtactagcgggctattaagggatacgcgccgagggaaactagttcaggcacaggccgctagttcctgagtcatctgatagaaaacggcgaacccgtggtcttgatagttattattagtatcggattggggcaattttacgcgagcagtgctgagtcgaacatactagtatattgttatatattgtaaaaggcaaccaaagcggaaactgaaaggaaatgtcttggacaaaggtctcatactgttgtgcggtggtcttagtggttgggtggcccgtgtttcacgattgcatatggatgcgataagtaatgataggcgttaatttgttagatggggggtttagggtgatccataagaaggctatccaatactaaagcctatgattgttaggaggtaatagatgtaatagatgtacggagtaataaatgataaatgccgtggttgggattgtaatataaaatccaagctggggatgaataaaaaaaagaagcccctcctgataaggccgtaataggctttgtcagtggagctatttttgaaaaggtctcataatacggagtacatagtatgatgtatattatcctattgaattttcttttatggacccttgatgcaaccgtagttgtgctcataactacgcgagctcaatctgtaacatctgatcgccgtgatcggctggaactatacaggacgctttgggtaaatgtacggattattcatgtatggatgtatggatgtatcgtatcaatacaatgccacccgtggttgtttccagcctcatccgtgtctcacgacccgcaaacccaaggacatgagtcttgggtgctccacttccccctcatggaagatcccaaaggggtccactagactcgtccgaccttttctatttgtctcagtggttcgctggccttgtccgttcatccaatcatgtcctgccagtcactcccgcctccctttttttagtagcgtgtggcagtgtaatatatttctactgatatacggaatattccgtactttgatatggagatagatatataaggcggtccctgtcgttccttcccaaggttcttactataatcccactttcgtttccgctttccacgctcgagatatttatatttaatagggtcgcttcctggacttcctttcttttcgtgttcactcacactcacttcttgacgcgtatcatatcatacaatgccgtcgttcatgaagttcgcgactgcggctttcgccgtggctacacctttcgtttctgctcagacttactctgactgcaatccgatggagacaacatgccctgccaacaagggtctggcttcgtccagcgctcacttcgacttcacccaggctagctccctcgaccagtggaagatcagtggcggacaagttcccactaccgccaacggtgcccagttcactatcaacaaggaaggagatgctcctaccatcgtcagcgatttctacttcttctacggcgaattgtccattgagatgaagacttctcctggccaaggcattgtcagctccgcgtttttgcaatccgatgacaaggatgagattgactgggtacgtgacatcgaaatcggatcattacttccaacatacagaataattgctaaccgaaatacaggaagcattgggcggaaagactgacaccgttgagaccaactacttcggcaagggcgacacctcgacttatgatcgtgagacctgggtccccgtcagcactcctcaggactctttccacacctacaccatccaatggtccaaggagagtatcacctggttgatcgatggcgcgagtctccgcactgtcaagtacgcagatgcccagggtggcgctcgcttccctcagacccctatgaacatccaccttggtatctgggccggtggtgctcctaccaacggacagggtaccattgactgggctggtggtttgaccgactactccaaggggccctacaccatgtacatcaagagcatcactgttaacaacgccaaccccgccgagtcttacacttggtccgacaagtctggctcctccgacagcatcaagttcaccgggtccaacgccgtgagctctcgcagccctactactactgatgctgccaccgtctcctcttccgaggctgcttccactactgagtctccttccacctccgagactccttctaccaccgaggctccttctactactaccgagagcacttccagcgctcccactactctggctaccaggacctcaatctcctctgccgagtccactgccgcttctagctcttcatctgccgagtcgactgctgagtcgactgctgcttctagctccggtgctgaatccactgccgcttccagctccggtgctgccggtgcttcccccagtggctccagcagctctggctctggctccggctctagctctagctctagccccagctccagctctggttctggctcgtcctccagtgccagcgctagcgctagccccaccttcaacgcagctgcctctgtcgctgctacctacttgggacccgtgtccctcctgggtctggtgaccgccctgctccagctgtaaatgtcccttttgagcgctatgattttttgacgcatcattaatgacacgctcctcgaaagaggatacttggctggaccgggtatggtaatagttgatgggatgcgattgtaattttttctggctgtaccattttttttcccttttcgttgtccttggcgcccaaatgcctgcaacctatcctatttgttaggtggcccggatgtgttaattggcatcttccggtaactggcgattttctttgggcggacatcatgtatctatcagcgtcatacatactttgccatcgagcaaacatgcaataatatcaagtcaattgactttctcaagcactttaatcttttccattgtatacaatcgaatctagatctttcaccgcttgtttctggttgctgtatatcccttgactgttcatcccatcgtgctcggctaggttatgtacgttccaacaccaacaccagcatcacattcgcatcaatcatatgcataccggtcctcgcttccctcggcttagagtcccactatggtctaactgcggacgaacacctacagaatcccggaccctgggaaaatttgcaccccatgaaccgtggatcaggctgttgattgaacttgaattgtaatgggcctgattgtggattggctggtgatgaattgtgcctaggcgaaatgtctgtagtcggattggttggttgagtattgatgtatagccgaaccgtggttggcgcaatatcggatacattcgtttccaggggtttgggtttggtttaccggatttactatgttgtatgtatgtatgtacgatgtattgtatgtgtttgggtgtgaattgtatgttttacttcgtatatcgtagtaggtacaacatccttcgtaaaaaaaaaaacaatcgtaaatggtaaaatactgtcgtggctcgttattgcgtctaactcatctcatctcatgttctcggatagaaacgcccaaagtgcaaagaaaaaaaaaagtagtccaaatagcttgaagaaaacccttcaactgaaaactcgatcaactttcggaccctgacaaaaatccgggattctcctcagggtccccaacccccgtggagacctcaattcaccaagtggacccagccccagtcgcacgtcgcacatcctttaactggcgtgataaccgcaacaccgagtcagcaacaggacggtggtgcgtggccgcgaccctgagcaaggcaagagttgcggcgggccggggtgtagatgtgggttcggtggatgcggtagaggacacggcagacgatgacgactccgtcagtgcatctgcattggcatctgcatctcctgacgatcgcccccggaacaaatatgccccgaagggtcccagcgggagcgaatcgagtacggagtatagcctatcgctgctgctgtcctcagatgcagatcggtgattgtgcaatgttgaactccgccgttcttcgcgtgttacgatcccgtccaccgcttcgaggtggtcgtctattgttatgaatcgcgtgctgagggagtctgctttgctgcggatctgcgcgcgcagtcggtctagatactcttcgcgtcgtcgcagctgtatcgcgagtcgtgtgtctagagctgcggtgccgcttatttcggttgctggtcgggaggcgagcaggctgtcgattgcggagcgtaggtcggcgcggagagagtcgaattcccagactgctgtttggacggcttggttgctgccggtgaattcgagatccagcgcgttgcgggcgtctgggaaggttgttttcagttgcgattctaggtcagcgagcatgctttcgctttgtttgaggattgcggatagaggtgtgagggtttcgagggccgtgtcgaatatggattctagctggcgctgggcggttgcgagagtctcctctcggggtgttgtggatggagggtaggcgctgcgtggttggtatgcagggagggtgatgcagctgttggggtagagagtcttgatgcttgggatacggcagaggtctttggcttggtagactacctcggggagaactagcagatgcaagataaaggcgatcaacactgcgttgactgctttgcggacgagggcactatggccacgaaagatggatttgcatttcacgactaggcttgcttgtttggtgggggtcgtctctgcagacaaaccagcatctgcatctccagctttagtggtctggtcttgctctttctgctttacatcattcggcgtggacactttgcgtcgttttttcatgctttctgggccttgctgcatcggagtccgtacatattctacccaagacccgtctatgttaggtgcttcgcagatagagggcatgatgagctccgggcctgatatagtccatgatgatgaggatgtgggtgactctgctgacggattggccgtctttctggtcgctttgtcgctttcatgccggcgatttcgagttttggtggggtctttttccttcagagaaacagttgatgctatcacccaggattcgccaagagctgagcgatctggggtacgaggctgttctgtagacatggcgtaaacatttcagcaaggaaaatgcactttgtgtaatggttaatagttctgtagttaatatctcatgactcggagtgtttcaacgtatgtttgattgcgactggctcaatcagaccgcacgcgtaaagcggtggggaagaaagatcggagaaacgcggccgaggaattgagaaccttcagcaaccatgcgctcattacttcgcttgagaccgtccttgcctggcgttcgatctctgccatggcaatttgcacgatcgcgaccgctgtcatacacagcgattcgcgattgctcgtgttctgataaaccggaagctcccacgatacctcccaccgaccatcgagctattggaaccgcccaggagctcttcacatcttcagtctacagtcctggatctcctttattcctcccgaatggcacacatgttgtcaacaaactcatctccttcctccgcacacagtacctacaatatggcttccgtgaagtcctgactccgatcatctacaaaaagtcgctctgggagatatcgggccactggcagaactacaaggatgatatgtatgaggtgaccggccgaggagctagtggtgaggcagagggcgaagtgggtgaagacgaatcctacggactgaagccaatgaactgtcccggccactgcctactcttcaagtcgcagaatcactcctaccgcgacatgccagtgcgctatgcagacttcagcccgctgcaccgcaacgaagtgtccgggtcgctatctggcttgacgcgcctgaggcgtttccatcaggatgatggacatctgttctgtagaccgcagcagatcaaatcggagattgcatcggcgctgggatttgtggatatggctatgaagacatttggactcggtccgtatcgattggtgctgtcaaccagacccgaaacggattatattgggactttggaaatgtgggataatgctgagacgcaattgcgcgaagctctggatagcaccggacgcgaatgggcgctgaatgaaggcgatggtgcgttttacggccccaagatcgacatccagctccaggatcaagctggaaagtaccaccagctatcaactatccaattggacatgaacctgccacaacgatttgagctggaatatcaagttgcagagggggagccggactacaatccagccacgcccggagttgcaagaccagttatggttcaccgcgccattttcggctccttggagcggtttttggcgttgctgattgaacagcacggtggtcactggccattctggctttctccgcgccaggccattatcctgacggttaaccaagacgatgctgttgtgcgccgagctcaagaagcggccgccaagttcgctggtttccgcgcattgctgaatgatggtagcgccgagtcaccccgtccactgtcctctgtcgactctacgttcttggtggacatcgataccagcgcacagaccctgggcaagaagattcagcgcgccaaacagatgaagtacaacctcatcttcattctcggaccacgggacctggccgatggtggcatctccgttgatgttactgggcagatgaagagcaagacggataaaaatgctcagacattgcaggcgctgatcaaagccagactaggcgatgatgcgctgcagaatcctcgagctatcaagcttagtgtggacgaagttcatccgctattggtggaactcgagaagaactttgtgtaactttgtatgttgtataactatatgtgttgtcattttgagcgtgcctgactggatctttgccctatcattgtatattagaccgatcttttccgaatccaagtcatcattccacctgatgcacacaataattccaaacaatgcctgcggctatccgcggggtggatgcctcaggagacaccactccgatgttcgggcccctatggagacgggcacagtatgtagatattcgttgcatatgactgtcaaatgaagtaaagggaacataaatgatattaattgacattggcaatctgccagcggtatttcaatttcatcatcaagtcacttgcagatcttcacgccctgtggtcgacaatatacacatcacgtgactccgctgtcggcgccgaaaaactcggcgtcattgacgggcccatttgagtcacagcatattccccattcttaattggccttcttttctcttttgctataaaagattccccgtgtccatattttggaagccattttctgcttttaatcacatcaatatcgagtctgcttggctcagctataacgacaccctaccttttatcgtctcttatccacttgtgcccccgcggtgccccgccaacactatgccgatgtatgttgcgatgactccaattcggtgttcctacatactaatctcttgaaggctcaaggatccctcaaaaaagtacaagcccttcaagccggtgaatctgccaaatcgccaatggcccaataaaattattgacaagcctcctcgctggctggcaactgatctgcgtgatggcaaccagtctctgccggacccaatggtatgatatgatgtactgcgctcaatgctgtttcccatattgattggattggatctataggatggcgagcaaaaataccgtttcttcaagatgctcgtggatattggttacaaggaaatcgaagtgtccttcccttccgcatcccaaacggacttcgactttacccgccgtctggtagaagagcccggtctcacacccgatgatgtcgccctgcaggtcctggccccctgccgtgaggatctcatccgtcgcacagtcgactccctgaagggcgccaagaaggctatcctccacatctacctcgcaacgagcccctgtttccgtcgcataatcttcaacatggaccacaagcagagtctggagatggctgtcaaatgcacaaagtatgcccgctctatcaccaaggacgacccctcccaggccggcacagattggcaattcgagttctcccccgagactttctccgataccgagcccgagtacgccgtggaggtctgccaggctgtgaaggctgcctggggacccacggaggagaagcccatcatatttaacctgcccgccacggtagagatggccacccccaacgtctttgctgatcaggtcgagtacttctgcacaaacatgactgagcgcgagaagtttgttgtctcagtccacccgcataacgaccgtggctgcgctgttgccgccgctgaactggcacagatggctggtgccgatcgtgtagagggtactctgttcggcaacggtgagcgtaccggaaacgtggacctggttactctcgccctgaacctgtacacacaaggtgtctcgccaaacgtcgacttctcggacatcaactctgtcatcaaggtggtagaggagagcaacaagatcccagtcaacgagcgtgcaccatatggtggtcagctcgtggtgtgcgcattctctggaaggttcgttgtcctttctttttcctacgttattcgctttgctaacctatttcgaatccagtcaccaagatgcaatcaagaagggcttcaaactgcgccaagatggcgagggcgccgacgaggaaaccgagtgggaagtcccgtacctccccctggatccccaagatatcggccgtacctacgaggcagtcatccgtgtcaactcccaaagtggcaagggtggcgccgcctggattatcctgcgaagcctggagctggatctccctcgcgctctgcaggtcgagttcagcaagatcgtgcaggagaagaccgaggctgtcagccgggagctgaaacctaccgagatcgtcaacctcttcgaggaggcctaccacctcaagtcaaacccccgcttcacccttgtcgactacagcatcaccaccgaccgctcgcagtcccctgctcctcctgagcccggcaaggccctcaacaccaagaacctcaagcgtcgcttcaccggtattatcgagatcgacaatgttcagcatgccatcaccggtgtcggcccaggtgctatttcctccctggctaccgctctttctaccctcggtattgatctcgatgtccgcgactacaaggaacactccattggtcgcggtcgcgacaccaaggctgctacctacattcagtgcacagcagccggcagcaatcaacaggtgtggggtgttggtatccaccaggatgtggtccaggcctctctgattgcgctgcttagcgccgccagctcggtaagatctgttcctgatttgtctgcatctcaccactaacatgcgtttagttcctcacctcccgggctggttctcctgctcctttccgtcccatccgctccaacaccctcaccaacgaggacatcgaagctctcgagcagttgaccagcactccagaggctgttacatctaacggcggtctgagcgccaaggccaacatcgaacagctgacaaaaaaggctgaaaatttgtaaaaaaaagtttaagaaaagcaaccgactaaaagtgatagcgataatgtgaataccatgaacaatttgaatcaatattttcttcaaggattgctcttcagatgtaacattgacttagctgaatatagtagagttgaaattcgtggtcattggctagttatgcatatccaccgacattttcactcatgtcaagctataaaagaccagagacattcgagctcaccacccaaacaactcatccaaactccatcctctctttgcactggccccataagcattgaacgtctgcggcccctcagccgaaataatatacccattctcacaagacgagaacgagaccttcggctgattcgcgtagaaggtatcgaagcccgagtccagcgcatcagcaagactgttcactttaccggctgggtgtagctggcgccaggggtatcgacatgcgtcaccttcgcaggacttgagcactagcatgagtgcgtccaatcgcgctattatttgtggcagctcacgatttgcaatcttgtagttggggtgtttggctgggtatgtgcctaggttcacggtttgatggggatcgctcttttttagagtgttaaggcttgttgaatatcctgtgggatagaaggggatggatggcttaccttcagatcgaagaactctttctcgtttgtgcaccatactgcatagtatagactatagtcgtcggcaaccagtcggatacccttgtatgtgtttctttggtagctgttatgtggctggtcgagtttgtcgctggcatacccgtagatcccttctggtactgcctatcttgatgttagctggttggttaatatgtgcttgctgtgtgaattactcactaatccccagtattcaatagcaacatgctccgtcctattgtctgccgtgctggcagcaatggtagtagggatagtcttaccgtccaatccgtctcgagtaacgccagctatgttcaagaaagtaggagctagatccgtatgagaagtgatagcatccagagtctgattctttccgataccagggcctcggacgatgagagggacgttgatatcagtttctatacgagttagcatatctatacaccatagacaatcaagacaatcaagaccaactcaccataaccacagttcttaccaggctgcatccgatgctggcccagatgatacccattatccgtcgaaaagaagatataagtattatccagctccccaaccttttccaacctctcaacaagcctcccaaccatctcatcaacagcctgcaaagcccgcagccgacaccgctggaactcatcaatataatcaacattcgtctgattcaactcaggcacattctgcacccagctaacggcattctcaatcagtgtattaaagctctcatcgcgcggcgcctgcacatcctcaaacaaacccgcatgccgcggcgcaaactccggctcaccgaaccagttcgcgttcctcgtggaatcatgagacccattcgagtgtggcgcgttgggcgctactgtcagcatccacggctgtttgtgcttaaccgcctcgtcgatgaaaccctctgctttttcggcgatcacgtctgtcgagtactgcccgtcgtacttgactggtgctgcgccgttgcgcgtcatccgtgcgtaccagtatcggtatgtgtacggatctaggaggaagtccgagccgttgaaccctcgtacgtacggattgttgtagttttcctctgtgtgtgcattccacatcttgcctacgtagtaggtgttgtagcctgcttcttgcatccatagtgggaggtagttgtcgttccagcctgctgagactacttttggatagccgccgtaggggagtccaacgtcggttacgttcgtgttgtgtggcatgcgaccggtccagaggttggctcgggatggacagcatagtgcgattgagcagaaatgtttggagtagcttgttccttgttgaacgagagtttccttgttaaagtgttagtctggggagggagaaagtagggcttgtatggaaggaatagacccacctgcaacttgggcatgtgctctaaaccgcccacatatttaccctgatcatctgttagaatgaagagaatattaggttgcttggcgacagctagagttgtcaagagcagcaatctcagtacgttcatcgctgcgaatttggcgttattgttgagcttgagagctgggaggatctatataaccccggcttagctctttggcttctgcaagccctgcgtcatggaagagacgtaaagagaccgaggagctgttgtgtgatttctccatataattgcatattgtcgatcatccgagtagaaatcgtaatgctgtacaacgtactccgtacatgatcggcatgtcagtgataggttggaagtaacagggaagtcgatcagtcggagtataaaaagatcggcgattgcgagcttgtgcacatcaatggtgttagggtgggtcgtatcctttagtctagtacatatgataacgatcaaccaaatcagaaatctgatctacaagcgtcagaaagatatactgggtatgtacaaattacaaacatagagctaaggtattgaggataagccggataaagaacaagcaatgctagggggaaaagaagatcagaactgtcaagcaaacacgccggccggcttttaaaaaggtatcatttccaatctgtacaatgtacgggctcaatccaagttcaagcctcgtagttgccgatttggcggtgcagaattgtcgctgtctgtgcggccaacgtcatgcccgtcttctgcgcctagtgccgactggtacatgagagcttcttggggccaatcattgaccccactgtcctgtgtgcttggacgtgccgtctcagcagggggtgtgctagcagcctgggggctgttggggttccatccctgttggctaggaagcggctctcgtcccgtcgagggccgttcatcgccagggtgtccatacgattgagactggtcagggttgtcggccatatcaaaactgaaccggaaatcacggtccacggcggacgtacccgcggtgggatccaacgtgttgtagtgttgatcatcaaactcggctacgaccgtggcagactgtggctccttgatgtgaggcacagcagagctaggcccggggataggagtggcaagaggactattgtcagtaacactccccagttcatacggcacagacccggcttggccggtctgataagtagccgcgggatgactggtctcttccaatgtcaccccacgtagagagcgagggacatttgcgtcgatatccggattcattgtggactgtcggatgctggtgcccatggtgcttccagccttggaaactctgctcatccggtgctgaggtatgtccgcaaatgggctatcgccctccaggtcgcgaatactgaactgagcaatggttcgcagcttccgggttacccatgaggcgagaaccttgccgcgctgcttctcgcctagacgagagcgggggaagtcgccgtgggagacgaatgcgacaatatccgcaacgacttggtgctccatgaggataacatcaacaatgacggggaccagggccgctagataggcttttcgggtaacttcaacgacaacaacgaccaagccaccggcttggaaaatagcactgagaatgttagcctccaggtcagatctcaatagattatcatctacttaccatcctccattcacgatattgcggtggcaactctctacggagttttcaatgtccatagggaagtgattgagtccattgacttcaaaagtttcgccgatactgccgaggaggaagaggacttgcatatcaactggctggccgccaggaccgatcggccgagtaacggtgtgaaggaaaccaagatcaccagtacggacataaggcacgctggggtcaccgtctgcaactctgccgttcaaccgctcggagtcaaattcttgctttgatttgtagaacccctcagcgcaagcgtcggactggacccagatctcaccgtactctccaacgtgcgagagagtgcaggtctccgggttcatgatcgcaatctgtgtgttaactgggaccatgcccgaatcctgcagcaaaagcgcggtaggatcggcatcggggtctacggggtaaataagaccttgacggaggcttcgcaagtcgagccatagttcgatcggctcaatgcacatgtatgatcgtgtggtaaccatcgggttgagaacgtgcgagtaaatgacgttgatcgaggtacggtccaagctggcattggcgaaatgtaggcgtacctttccatctgtataatcggattagcttctcttcatggctctgatggtgacgacacatacagagatccgttctaggccgcccctctgcggaaatcatcaggttcttcagttcttgaagctggaagccttttccagccatagcactcattgcgtaatccaacatctgactggtggcgtaagtgtccttgatcttgtaccgagcaagggttacgaagagagtcaatgggttttgagcgaaatcgactggtgaaactagatatgtaggcgcacctgaataatatgttagggtggagatgttcatagattagcagcaaacttaccgacgtaaatgcccatcaagcaggtgtggaggaatccgagacccagggtacttcgaacacttccaagcaccggccttgagcttgtcatttggcaggtttctttttgaaccttgcacatgcccattatggtttcatgggaaatttgcaccgagattcttcgctgatctggggtccaataagtccagaccatagcaggctggttaccctggagccaagtatccttcacagtgtagccgagctcgcgacatccgtgggactgcttcgagggctttgtggtattgtatatagcaggaacaccaatgcgaagaacctgggcggactgcttgatatgctgcgacacaagcttctgcctcatgacatggtcaacatcgttattgacaatgatggccttgatgttgaagtcgccgatgacgtgcaagaatgcaggagcatcctccgaaagacggttttgatcaataggagccatcgggatgacaacggcacccaagcacagacaagcatggacggcatagacgtactcttccgagtgggtgtacatcagcacgagatgatctcctggtcgcaccttcaccttgttcttgaggtaggtcgccaccgcagaaactttgaggtcaaacttcttccaggtgacgccttttccttcctttccacggctatcgatagagcagtaagccaattcttcagcttggcgagcgactcgccattgaagaaggtcgacgattgtgttaaagttgttcaatggggtggaagttcggtcatccatcactacatcgcgataatccacacccgaatattgcttttcctggtaggcaagcaagtcttgtcgtgatgctagagcagtgggggaccagattccaccctcaggatcaacaccgacgggcaggttcatcactgatcgttcaactccaaacttaacatgcactgcttgcagcataccgcactcgaaatctttgcgacagagcatgttgccaatttcttgtctgccattcttggtaacgcgcggcagactgttcggggctgtaagtagaacacagtatacccgtagatgatgctcttggtatagtacctccatacacctgtcggcgagcgaatcaagaagaaccgagtcgagctgccttggcggaccgccggaagttgttggcgccgttgaggccgagtaagactccaaaataatcacaggaagatgttcttcgttaacaaacacatcgaacgcagtacaatcatgaattttcggcaccttcttaagaatgctaactgttagatgttgaacgaagaagtatcgatgttccacaatctcttggccgtgctcaacccattcgactttttggcggagacgatcctcgtagagaccaagcacgaaaagtcggccctcaatcacacatccaagtagaccagtgcgcaggaattcaggttccacgagtatcggggtcgggttaggctcctcgaatttgtaggggcgagcgtggaatatggcctctgtgtgtttcggcaatgcccagaagccaccagaaagagagggtgaatcaacccaaatctctccaataacatttggcgtacaaaggagattggtctccggatcaacgacagcgagagttgcgtcaggaattgggtagccgaaagcgccaacgcgtacagcatgcggcatactgctggcatactttcgtgcatcctcgcccatggctagcacaaccacttcattgctctttaatgcctctttgtctagaagcacctcgctaagctcgtttttagggctctgcttgatcgtagaaactcgtgatccaccacccagaagactgcttccgaagcccgttttagtctcagacttggtaaggctctcgtcctctttcttataatcatcgcggccggctgggtccatttcatgggtcaaggaacatcccattcgctcttcaccaccgagccagtcacgcatactaatgaccatacctccatgctctggtaagcagagcatcggagccacaatttctctagcccgtgggttcctcattggccgaagccatctgtctgccaggatttcatggaactcagggtcgagagtaagtgtatcgatgagacagagtttgacgctgctgaaattaggttccgagtttttcttaaaatgtcttgtggccatcggatcttgctggtagttgtaggtggcgatcttcaagccagagtaatcggtcgccatgactgatgccttgtatttggtgatgagatgggcatataaaccgggtgtttccacagcccggtcctcgtgccaaacggttgtatggccaccgtaaacggtgaagagaatggccatgatcataccaattccttgtctcggatcgaggtaactgatgatcgtctctcccttagtgctatattgcctagcgcttgactccacaggaactgtagaaatgatcgcactcagacatgccatttgatgcatgatagtccggtggctcatcacaacaccacgcatatcacccgtcggggccctcgcaaactcaatataggccagatcggggacctgcagcgcaggtgtatcgtccttcttctttggatggaaactgccgaactcattcgtcttccaccactcgactcctcgtggccaactgagtttttgagctgtgatatcgcgttggaagttcttcaggttattctcagttgtcaatgccagatgtgcctgcgttgaggtgagcacaatatttagacttgtgtaatcatccagactgttgataggcacggcgacaactcctgcaataaagcagcccaagagcgcgacagcgaactcgataatttcagcttcgcggtagatgagagcgacacgatctccgcgatatagattactcttatcgcgaataacctgagcaactttctcggcgcgactagacagtttttcccacgttatcgatgcaacctccttgccctttgcatccagcacccaatatgctgcttgcttggggtgagcccgagcacgatgccgtaacaccgcgggcaggttgtcaaagttcgacatggggacatttttgtcgtgcggatcgttcaatgagaaaggaatctctcgaggttcgaggggaagtagatgctcaatagccggtccgtgctgaagttccgccccagcaggcatcaatggcggggccatgtttgctgttggcgaaaaggcttccccggactgagaatagcggtggaagccacctccatagctatccctataatcatcatgctgttgccccgcaaagtcggaaaagtagccctgctgggaatcaagcatcgtggactgtcgcgtgggcgctccagatgctggatcgtaatatgccatgccctcgtccgcgtactcaggttcggcgggggtatactcctgaggatattcctgagcgtactcctgagggtactcctgagggtactcctgagcgtactcgggctgagacatatattcgggctgagaatttggattgaacgcgtagttctgactcattaaagttgcggttctggaaccatcctggccttgtaaccctggggctgggggtttaggaaggaagagggagtcgtaagagctccctgaaggcgcgcggtcatgagcttggagcatgctttctctacgatgagaccctagcgatgcatgcgactgatcctgtgtatttataccggcaccttgatcatatccgacggctccgctgccctgtgagccatgactgcctgcgtaaatgggggaagtgacgtgtggcagggaagaatcggcagttggtgggcgaacgctcagaatggccggcgggacccttccagggctggttggggatgcatcgtagccaagaccggcctgtgaattgatatcaaggggcttgttgggaccgaaatattgcgaaagcaggatcgtacgtcgcttctggtatcttgtcgttgtcagtcctatgcatctgctggtccagaaatctctgtcgcaagaaccaaatctatgacaaggcacaattggcttgtaatactggttgtagccagggatagcttaccctttttgagtgatatcgccctcctgtcatggatcatacataagaaaaagcatacaacaagtgcacgagatgtacatacctccaattcccgatctaggtcccgcaaagcggcctgtatctcgggagactcttccgccatttagatggagggtcggaaagcctcaattcggggaaacgtatcaaaagcgcgggggagggatggggggcacggagtcaagaacacctcatcgcaatgagcgtctcgagggcgcagatgaggggtggcggatttgccaagtgcagccctgatagccgcaggttgtatttaccggggtgtgagtcgatcagcgagtcaatccgtcctgtctctgatcttcgcgcaagacacccgcgcaacgtcacccgccaaggcggtcagacgagccgagagcctgagacatgcgacggagagactatatatacccccagatatggttgtctcagatatatatagaaggtgacgagaaaattctacatctataccatcaagcctactgcatagagttccgatgaaagttgtggctgttcaggtactgtctgacttggtgtatcgcgtgtcccagtctaggctcggaactactgggaatgagacaccaagttacaccaatttggggctaggttcgtgtgttcagtggaggattttggcttaaattgaatagatgtaaatttgatatggaatcaaagcccaaaagtattcagtagaatcagtagacagtcagtgcgatcaatataaggctgggattatttgggtgtggatcgtcataaagtttccttcctcaggcactgaggcaccgaggcatgaatcaggtgatatccactatcagcctaccctaatcacatgacccccgcacaacctaagcgaggcacaccaatttctttcttggatacccggaacctcatcgacgttcaaccaccaaacgacaacccggtcaatttcccacgaacccctcccgcacagtcaacatgtccgacaacggggacgtcgaggtcgccgccttccctgtcctgcccaaggaggttctggccgagcagggcagcatcaagctgttcaacaagtggagctacgatgatgtcgagatccgggatatttccctgacgtgagtctttctatcaggtcctctatgcgccgagtgaattcctgttgtgtgcgagaaaagaacgagtcgaattggtggaatggcaagacttcgacaactggaagggggatatcgaaattctttatcggaggggacacaacacggcttggaactagttttcttttcgcacacagcaggaaatcaacagcgcgcacaaggaccggcaatcgcgcgactatcaggtttacagaggtgctgacccgccatgacagcgactacatccagatccgctcccccgtctacctctcccactctgccggtcgctatgccgccaagcgtttccgcaaggctcagtgccctatcatcgagcgtctcaccaactctctcatgatgaacggccgcaacaacggaaagaagcttctggccgttcgcatcgtcgcccacgctttcgagattgtatgtgccactccgaccaattcaaccattcaactatccaattcagacgctaattctcaattctacaggttcacatcatgaccgaccagaaccctctccaggttgccgttgacgccattgtcaactgcggtccccgtgaggactccacccgtatcggtagccagggtaccgtccgtcgccagggtatgtgaaaaagtcttgtctcgccatgtctggtatcaaatactaactcccttccagccgtcgatgtgtctcccctccgtcgcgtgaaccagtctatctctctgctcaccatcggtgctcgcgaggcctctttccgcaacatcaagagcattgctgagtgccttgctgaggagctgatcaacgccgccaagggttcttccaactcctacgctatcaagaagaaggatgagctcgagcgtgttgccaagagcaaccggtaaaggggttgtgttggatttgttctccgtttggtcctctgtctgcgtatactggagtggacggggttttaaccgggattcagtggattcgcatgcatctgcaaggctgtacataatgtgatacagtcaaggaggaagcacgatcttaaaagggaacgcattcggacggctttctttgtagttgtgatgcgatcatgaagaccttgggtcgtaaagacctatttcctaaaaagaaaaaatttcttttattctcgtttttgaatggatctagcaagtctagcatagagattgtagaagaatatacgatcaacatgatccaatgtcttaatgtttatgatttgatagttctagccaaatcagatattgccaaggttgagatttttcatcgcttatcgatacggcgaatacggagaaaaaaagtttcggacctccaacataccctccccaaccaccacattcttattttcaactccaaaaatggtgaaaagaaagctgggagccttggaaaaggtcgaggctgacctgtacgtaaatgtctgacccgatgcgccctgatcaattggtcagaggcttcagtccgtgatgctaacatcttttttttgcgattcgcaggcccaatttgcagcacaagattcgcagagatcctaagtaagttatatgcagagttccctatgctattttgtacacggtcggggattaattatcgctttgcttttcaggtcttatatcgaggattttcgcgcccaacattaccaatatgaatcccatcgtgagattttcatggcggcgcctacatctgctacggacaccggtctgatttctcttcgggatctcattgacttcatctctcatgtggccgactgttacccgggcatctgtaaggatttcccgcaacagctcattgatatgctcatgcagcaccacctggtattggagacagagttgcgggagaagctggttggaagtttagcgcttttgaagaagaaggatcttatagattcagcaaagtgcgaagaccctttcattacttccctactttcgatcctaaccactactctaggctacttcacactctcttccccatcctcatctctacacctagcaagaccctgcgggctctgctcttccaaaagatcctctctgagctacgaaccgcaaatgcaaagaccactaaccacaagttgaaccggactatgcaaacagttctattcaacttggtcacatcagaccgcacatcggctaaaggcctgtgggcgatcaagatcaccagagagctatggaagcgccaaatctggacggaggctaaggccgttgagatcatgaaggaggcagctttgtcacaaaatgagaaggtcatcatcggtggagtccgtttcttcctcggtggcgataaggagcgcgaggaattagaggacgaagacagtgaagaagaagtcagtgttggccaggttaagcatcaacttaccatcaataagaagacccgaaagaaggcccgtgtcgccgaaaaggccatcaaagcggtcaggaacaaggagcgcaagaagggaaatcccaatcctctcaacttctccgcgcttcatttgcttcacgatccccaaggattcgcggataacatgttcttcaagcatctccagaacagcaagtctaagttgaatctggagcaaaagcttcaggtgctacagctggtctctcgcctggtcggcttgcacaagttgcacatcatgccgctctactcttacttccaaaagtaccttacgccccgccaaccttctgtgacttcattcctggcatctctagcccaagcctcgcacgacttggtgcctcctgatgttctcgagcctctgattcagaagattgcaaatgagttcgtgtccgaagcatctgccggtgaagtcgccacggctggtctgaatgccatccgtgaaatttgtgctagacagcctttggctattgatgagaccctgttgcaggatctcgtcatgtacaagaagagtaaggataagggtgtcatgatggcctccaagggtctcctcagtctgtaccgtgatgttggtgcgcagatgctgaagaagcgtgaccgtggcaaggaggcctcgatgagtttacgtgctggtgagagaccagagagacgttacggtcagcaggaggccggcgaaattgagggtctggaactcttggctaagtggaaagatgaggagcgtcgcaagaagaacatcgagaatggccttccatctgatgcggaagataacgaagaggagaacgacgaggccgactgggcagcctggaacgtcgaagaggacgaggacagcgatgtcgacggagaatggatcaatgtggaggaagatgttgacattgtactgagtgattccgaggatgaaggcaagccggcatcaaagaaggccaaacaggacgaagagaccaagaaggacaccgaaaaagaagccgaaaaacccattgatttcatgaaactggccaccacccgcatcctcaccccagctgatctcgccaaacttacggagcttcgtgctcaggccgcagccgaagccactcttccgggcaacaagggccgcgtcgctgccccatggacctcccgccataccgatgacccattgaccgctggtgagattgagggtcttgctgctctatctgccgccagggccactcgtgaggaacgtattgcccacgccaaggagggcaagactgagcatatgagtaaggaggctcgtcgcaaggaacgcaaggtggagcaaggaaagagttctaccaacaaggaaaaggctcgcaagaagaacttcctcatgacgttgggcaaggcgcgcagcaagaacaagagaagtttggtggagacccgtgctgtgcttcgggctcacgtcgatcgtggcaagagaggcggacggagaggaaacgttggccagtgataggctttttatgtccgtttttcttaaaaataatgatttgttatatacagtacattacttttgtcattgcacgaggctcacaggatagaccataaagagcatatactaccttatgacagccataaccctatcaatgattatactccatcgtataaagtaaagattaattaaaggtgctcgattggttccacgacgcgatattagtgggggtactatgcgttgatcaacgcgtaccgcgttaagtggcgtccccgttgcctgagcagcctcgtccttttttctttttcttcccttttcccactacactacgtcactcactcgtgggcattttgagaatactcccatattgaaatcgaaaaccgcatatcccttttccaacatggcacccagcaatagcgacttgtcaaagcgacgacgcttccaacctcctatcacaacgttcttcacatccgcctcggaaccagtgtcttcagctacacctgcggtgtcacaccaccaccattacgccgcagcaacattctctgcccacccggttgtgcctgccaaagttcagtcatcgcttctgtctgtcggaatgcgggttcggaaatccgtcgcagacggttatagaaccaacatgtccaagacagaagaaaaggccccactctcgacagctgtcggtcaaaccccgcgtgctcaaccctaccacggcagcagatactctgagctgtcacctttttccggcactggtaaatcctccagccacgatgactccctcgttaccgacgatggcgacgcatactcgatcccatcaagcagccaagactcggctgtgtcatttgccttgggcggtcaaaagcgggctttggaattagatggtgacattctggtcgatgaggatgttgatgaatcatccaacaatttcggatcctggaacgagaactcatgcggacgaaccatcctgtctccgaatttgggccaaagtcgccgtatccttgctgtgcgacacagcaagattgaacagcccattatggacatggatgacttcgaggaggctacgttcctccgccgccgtgaggaagttgacgcagaggatgtgcggatgtacggcgcttgaactgttagtttgtgcttctcatttcacttcccctacgagcccttccatggcatggcctactatcttcttgtttatccttgttgggtctggaatcggcttggtttcttttaccagacttgtattatacccactgttgttctatgttgtaccatattgtcttgtacatttatctttttccatctgcagagcagcgaatgtgacttattacgaatattagttcatactgtcacgtttgtaatcaactctagggtccagggagcacctgggaactattaatatcaggcatcaccgtcagtatggacttgcactgagattaagactaaatttaataatatacaaaaataacgcaaccagacaatgagactgagaaacatcttgtataagaggaacggccaccaaatgtaggatgtatccctacatcccgagttgtaatcccattattccaagtcaccaatgtcgcaatcttgcccagtatacacgcatcttcaaaaatctcgatattcgaggtggaggatgattatctgataacatcgaaatggtactcttcctgcgagtacgatagttgtcatattcgagaacggtaatggtacccttcaaggtagcgccaaatttagcatcaatgtcgtcaaactgccctgactcaatatccggatattcttccatctcttgcttgggcgaatgctgatgtattcgatatcgaacgagaggatttatccaagtgtcactggaggccatggtttgtgtgtataggtgtgttagagatatgaaagtgtgagaagagagaagagaagtaccaatattatgaagatacatccatatatgtactagtagctactagacttttgtttgccgattttgctcacggagtacacaaaagtatattatctcgtggtccatgggttatgcatagggtttcacttccattccaaggtaattgtatgtattttgctacatttaagtagttattaactaagatgcagaattggagccagttatatattcctaatacggagagccaatattcaattattgcagaatagcacagttagcaaaacactcatgcttctaattccaagctcatggccctgcaattactcaccagtcgactgagtcagaccccgcccacgccattgccattgcgactgaataatagttctcaaaagggaaatcaaatattgattggctacatgcatctgggaccggtgggttatgattggtagagatgagtacgtcatctgtgaggctctcgtctgggtccgctagtcccaaagaggatgccaatatgtgagcccccggactccagggctacagtgttccaaatattttatgtggtttcactatatagcgaggtagtcacacttaagagccttgcagcgggggtccgagtcgttgattttctggcaaaattagcgggccattgaaaaagagttacctgacaaaccaagccacaacccaggataactaacttacaacattcgcaatcatggacctttgaagatccacacaaggggcctgtagagatgttcgttaggtacattttgtgccagccgattggcctagagatgcctactctctgtattagatagttacctatcttaatgctcactggtattcaagctcgcttttgttaatcattatattcccgtttgataagaataggccttttaatacagaggtacgtacttatttcatccaaggaagagtagtgaatataatctacccaataaacgttggacaaagcctattagataccgcaatccaactttctgttgtcctaagccgactagagccagacctaggaatcgcatggaagtaggagacaagtcagttagaaccttggaagttagaggggagtagaagtacggagtagagcaagcgagagccctggaaattgaatatgtttgccttctaaagttgaagtcttcagaaggaaagagcgtggagattgtttaccgcctggtgactgtgtataagaaactcttaccactttcgcactttcgaaatccatcagacttacatacatatctcatcgacaagggttgagaggtaaggaaggtaggcagtcctggaaaacatatcatgtgatgtgaacatacgatgacatatgtctgtacgcataatggtcgatagatgtatcgagtctaaagtagtaatagctgtagtagccagattcttccaaggttagattcaaggcctgattatctaagcatcaaaatgacctcggcttcgcacagccacagtgccacagccacagtttctgatctgctttgaccgtaaaccgtggaagtatcgaagacccgcaattgtttcaggtccaaaaataacattgaatgacaatcagatctcagtactgccagaacccctcgctcaatggaatcgatgtggtcgcatcttaacagtgtcaaccatcaactcatccacctccttggctccatgaaaacccaacatggcaccaaccactaaacccaaagttcgcaaacgcaagccacgtgcgagaaagaagaatcgtggtgtccgcactcgcgaaggccatgcacgtccgatagacgcaggctcgccggcccaaccgcttgccgaagtactcaacgagaagacaaagcgtcgcaaacccaagaaaacatgggccgcactcattcctgtctccgatgatcccctcgaaagggtaagtttgagctgtattgatatagaaggatatcacgctaaacattgaatcagaatattgttgagcaagtacctttgccagatgggtacgttctagtccccaagggtgatgtatacatcactcgacactgccgcagtaagaccaaagagtccgagcgaatagtatacgtcgtctacgtaagcgctcattcgaaccatcagtttcaagcccagagaaggaccgctaacagccccagaaccgcacgggcaaaagaactctgggaatccgagtgcccgaagaaatctatacagaagttcttgaatcagccgccgcaacaaaagaatcacgcgccaacgccgtgcaagtgcgtgacgctaaggatctctccaaatcccgagaactcttgaagagtgaattcccgcttatgcccaaggaaaccctcaaaatcgtcctggaacatgccttcctcaagggatcggggcgtgtagggcggacagggatgatcagcgacgatcgaaagacgctattggctgtggaggcgcatattcgacatgttcatacgccgtatgagaagttgcttgaggagggcgtcagtcggaaggatgctcgtgagcaggtctggcctactatccaggccgttgagcggacttggcaggggtgtgagaagaggaagactacattggctttgcgtccggttgacaagtaagggttgcattttgttttggtgggattgaatgggaattgcattgctggagtttgttgtggagttattgaggctatgaaactatgagactatagtgtttgggatcactcgaaattcactgattactctattctaaccagtagcctaggtacagtagataaatatttgaggcctatatgatctacaggtgaaagcaaaatcactaagaatatcatttgtggctatccgtatgtaagaacgcggaggagaagcaggagcaaatccccatcccacttctcaccccaaaaagcttatgggtctcattgacccagtcacacagcctcaatctagaggcgtggaccacggaggaacttcacctcgaaatgcgggtggcggtaaggcagacccgagaaccagccgaagccgtcccgtatcatgtcctgcatgatacccattcgaagatcagcacgagcgagtgcctgatcacggctcgcctgacccgtatcaatacggatgtagagatgcggaccagctcgctcaggcagggactccagaactggcagtcccgctctctgaagacgagtcacttcagcgcgagcgacggtcagcacgtcgaggtccagagttggcataggacggggcccaatggagaggtaaaacttttggcggtgcatgccactgttctgagcctgctcgtttatgcgagtcagggtggtggttggtgcaggctgagcctgttggggaggagggctgccgatctccattggatcaatgtccattggatcgggcgcgggctcagattggtcttcacttgtaaaagtggcaaagcggctgctggccatgccaggtcggatagggttgcgaaatgaggtagcttggtgggcgtttgttgcgtccggtcgtcctgtggaatgccctcgggcttgcctgatttgtctggcaacttgtcttgagagtgcacccgtggcgctgctttggtcgttgttgtttgccatagtgctaaataatactgtcagtttatgcttgtctcatattttgctgattggaggtcagacatacgattgtagggcttggtatctctgtggaagagaaggcatatgggttggtacacatgatgataaaggcgaaccacagtcacaaagagatcagagaccatctaaacgagctcaaaagtactgtttctaagctcttgtggcacgtgatttcgaagctcgaagagtttacatgttttgggtgttgaagatgggagaatcgaggattctcaattcaaccagtactgtttgctattaaaagaattgaaagaacgaaagaataaactaaatagtaatagttattggcttcacgcgtttctaaatgtattatccaaataattaaattcgttgacacttagatgtatagaagcacgactatgttgtagccaagcttttctggactctcgtgccttatcggtttatagttcctgattgggagtgccaagacatacacgggcggtcagccccacatgcaaacaatcagggaacaaggtcgacggtgcaaatgttctctctttcttagaattggacatggatctggaatcacagacaacagacaagcattcaaatatctttacaaagtcctctttacctcaatctccccaaatatcgcaattaacaccagtgaaccccccaaactcagtttccagggtccatcgcagttacaccaatcaggcaaaaccaatgaaatgagaccttcccggggtctgtttgggggcttagactgatagcccaaagaaaattcacccctcaacggtctcttatttgtcatggctagtcctctcaccactcaccatgagaaatcgcgtgtttctggggtttccaaaccggcataaatatgccctggtggctgcgattctaactctatttattcttttcaagtctgtgcccacatccaagctcgatccccacaccaagaagctgtacggggaggaccgaccgcggtatcttcaccagtctacatttcgcaagaacccagaccatgactacgagctcaagctctctaatgcgcttcgcgccatggagatagaaagggaaatgcgacacgatgaggatgcaacacatacactgtggcagattatgctaccaggagtcagccagcgaagcgacgattcaattcaattcgaggaaaagaattcagaatggaaatacaaagtaagaccgacaacagacaattcatatcttgattataccaggtcaaccgactaactttacaatttacagctgatagaagccgactgggctgacaaattcattttcgacactctggaatccatcccagacatcgctcgactctacaaatcatacccacactccgtccaccgcggcgatctcctccgctatttgattctatggtactacggcggctactacgcagacctcgacatatatcccgcacgaagcatcaaatcatgcccgtcactgcgcgactccatcttcaaagccaacacggttaacgcgaatgtgtcgctagttgtcggaattgaaatcgacgagccattcgcttcgccgcagaagatgcgcgactggcactgggcccgacgctacggcttcatccaatactcaatttatgcgccacaacggtttagtccgctactaagagagatcatcgtccgtgtgttgtcccatacgaagcagcgagtcgacgagggtcatttctggaataggagatacaacgaaatggatacgatggagatcaccggccccggcgtgtttacagatgctattctcgatgtgctgtcggatacattgccatctacacatcggttagtacaacagtctgtggatgcggacgctgggttctcgtcctcggcttcgtctgtgcagcgtgtgacgtgggcgcctttccacgggattcaagagccgctctgtgttgagagttcagagactcagcctggcaagctaatgggagggctgtgtgttctacctgttaacgcttggggtaatggacagcggcattctggatccgagggcttcagtagtcaacaagcttgtattaaccatcggtttggggggacttggaagccttggaaacagagctggcggaagtatctctttggctgagaggatatgattttaatgtttacatctggtgttccggggtgtacaggtcatggcgttttatggtatcttcctgattaatgctaccaatgtctttgtttctaatattgatatcccatagactgtgttcttaattggaatactattcaagttaaaacaaacttgattcctttattgcaagttgatatatcgaagttaacttctaacctgctcttataaaggtgggctggaagagcgaagaacaagtgaagaacaagtgaggaataagtgagtgatacctcagatctactaggtaccagctctggggtagtgtttactttgagataaatactttaataatggcagtgaattggaagaagcctggaaccacctagcaaacatttatgtccctctatattaacccactcattcccccgtcgcttttcccctgaacatcctctctcctcgttctcgcaagtggcaactgtcaatcccacagcatcaacattgcatccaatttttcgggaatgcccccaaatcagtcgaccccgatcccctctgatatcacgcaatggaaaaaagcagccaagagagcagaggccacattgaggacgagcatccacaccagagacccgttcaaatcaggctcttaagatattcgaagaggaatttctgcttctgagattacaaccaacagcaacgggtgaaccaattaccgtacttggtacctacgagtgaggagagggcctatgacaagaatgaggagcttgtgaatgcttcacttgtcattttcttacaagcagtctgcgcgaagcactccgatgtggatagtgacaggaatcagcgtggtctgaatcattgactaaattgaagcaagatgttttattctggccgaactagtcagaccaggaggtcaaagtcgcattaaccataagaatcgctcggagggggaagacgactgtcaccattgaagaatgggcagtcgacattggagaatgttcccccactcctacatcaccctaagcccgccaaacccttacgttgagaggtgaaggccagacattatttcccgcgcgcttccaatgctaatttcatatgaagcagtgtgaagttgcttaccttagtaaggcctcaagttaccacgccaaaattcgatttcaagaaggtcaagaatgacgaggaaaacggagagcttagatcggacgtcttcagcttgtcatgccaggtagacggcttcctgaagtcgaagtcaacctttcgagcacaatcaatcctcgaagcgaaagctctaatgcgtgacaatcatgaactgaatgtctattggcaggagactatggaactggttacagccctgttaaatgcgcatcccttcccaaggacaggtaagcctatgcagtgatatcactgtatttgagtctctatactgatataactattagggtgacgctcttttctcagactggatctgagctgtacctgctcaacgcctcttacaaggacgggtatagacaatacatgcagggtgatccgggaaagcgctccttgaagcaagacagacttttcgcattgggataatatcgaatgagtctcgtttcgcctatatggtccatatcttatcactgaaaagacatacgtctggtactttgccaggctagccctggccgtcgctctccgtgcaagcgaagaggaggatgcaaggacctaggggttcaaggacgccctcgcctctgctgcgagcgctggttctgctgccggcactggtgagtatcccacgacatattaatgttgtctatccctatataccagaagcaatactaatatcttccaaatagactcctcctatcacctcttccgccgattcccccagctatagctactccaatagtagctcttcctatcgtgtccccctccgcgtccagtaagttgaataccctcgcattccaaattccgagcccttcctccgccagtctcttgagaggaagcatctccactacagcggcagtcgaccaatataggccaactccctgtcatattcttttggcttgcaagttctgttaaggggtgacgctaatatttgaataaaaatagacagtactgccttgattgtcctcaccgtgggcctcgcccaccagatgacactcgcatcgttgattccgagattcccactaagtgaccaagaggcggaggaactagctagcttcctccccgagatcattaagaactttgttgatgaacggcggcttggccgaggactcgaagcatgggctctgtagccactattagctattttctttgaagatcattgaattctacatttttttttactcctcattgaagtaaagcctggttcaatgccataggaaaaattaggtgatcttgtcaggcaccaacttgaattactggtcaatcttcaacagttttacttttaacatcctgggacctggcagagaagctcacagtccccaataagtgcatttcaactaaaatacgaagtatagagagacagaggagcaaagaaaaacaagggactttggctatagtactaaagtcaatcgccttgtcattatagctgcactgctacccctaaactctttgggtatcaaatcggtaagcaagacaaaaacgaccttgtccccggcgagtatatcatataccttgtatgggaaaaattgcggggagattctcttagctcttaggagttctggagttctggagccttccctatcacacaattccacagtgtgatccaaggtcatttactagggtttaggcagtttatcaaggatgctccctggcttgaggaccactgcggatgctaccactcgctggaaggagacgttccttcgtattataataagtagtaatagtgaattgtggacacacgaatgaatattgatttctttgcctaggcccacaaatcccagggtacctccaaggtaaccctacggtcctggatgaaggtagcaataacactgggtaaatacccagacaggtcttctacttcctcgtccgttaattccaacccggggaccaacgaagcaggagtgatacggtaggcagctcccaccgtggggactactgcactagtggtgcctatatttattcgaatattagcattgctcctcagcaagacctgcagtcgattttctactggagatgagatgcttcctcctaagcgaacaacggaggaaggggtcataatttagaatgcgagggtatacaacttactgggcatggagggggacacggcaggaggatctactactggagtagtgatggccgggggaggtgcctgcgaggcaacagtatgggagtcggtcgaaggggaggcgacaggaggagcagtggaggattctccttagaatgtattagtattgcttctggtatatagggatagacaacattaatatgtcgtgggatactcaccagtgccggcagcagaaccagcgctcgcagcagaggcgagggcgtctttaagctctttggcggctagatgtactattagtacctctcattctcttgatactggccgcggcagacagagctcttacctttctccctcgaaagtattgctgtatttatgggtaagctttctgtccaactcgagtggtctcagccatgataatgtgagactaacctctgatcttttttcctcctcgggggcgctaacgctttcccacttttttgaactgtacgcatcaatgtatctccccatcattaaatcatctcaaagattgagtgcttacagtggtaggggcattggggccattggagacgctgggagcactgggagcgctggaggcgctgggggcagtggcctggcacggttgtcagtgttcattcacatattgagtgaggacatgggatgaccacacgacatggtcatcaataaagatgagacttacgggagtctttcttttctgagacatggcgatggcgagtagaaggaagatgataagatgataagatgataggagaataggagaagagggaaaaaaggaaaggaaagggaaagagccccagggggaacataggcaggagcactacacgtcttccttatctacgaacttcagtttatctgacgtcttgcacgacattaccttcaccttcccttttgggaaggaccgtgaagattctctccaccagtactaatacctccctctcccacgacgctcgctaacggactcgatcctctcgacctaatgtccgaacgaacgaactgcgaatgatatgttggagtggaggtacactacaatggtcgattgcttgagagcatacccgccgtagagccttgctaagtatgatcattgcttgctgcgcaatacagctcagctccagaaagaggtccgtgtctaggtataggaacactaggtagatctagctagatacgttgattggtcggtgttatgagtgttgcttgaagaatgatgtgctcccttgtagagccggcttttcattctaagtgacatgcagatcgcctacgattgatctcctcacagctaatcttcacgaattttcgaatatcataatcgtacgcttggactttagaacattgaggctcgctcatgtaggaatctagcgtaattgagtacttattaggagggcgctttaggttcgcaatattgcgcaataggattaacgttgtctttgtattaccagggaaccatttctaatctaatagccagaaatcatttttcagggtcaaggttttctttgtccaagccggagggagagcttgatgctgaacgcgaggagatggcgactgctcttcagccagaacaggctctatttctggaccatctcgggggttgcaattgttgtagcgaacgaaaagctccatctttccatcgctatctacaaaattgtagatcggcgaggatcggacaagtaaggtaccggaattgtcgaactttgcttgtaggagacggccgtgccttggcccaaagagcgagatgacgagaactgggaagaatgaggtatctccgaattctggctgttcgagacggcagtagagggtgtttgcaatagacgctaactcgctatgttgtagttcattttctttagcctttgtaccagtgagagtcacaagtttgatgtgagggcgagtggtcttcggatccttaaaatcgtcaagccattggcggatagaatgggcggtccatctcggaacatcccgaggctttgaatgtccagctttaacaccgcataacattcctgttggagtatcgttgaaagaattttcagccctaatagcctatgttagcgacgtagtcattaagaatagaacgagactcacttgatattattccaatgcgaaaggtcctgtatcgaggagatcgatcttcccctcttcctcttcctccccccctcctccctcccgtcctccctctcagcccgtgactcaaagacttcaagatagaaggcaatttgaccagctctctcccacatgaggcaatcctcgggaacatcgcctgtaacatcagcaaagtgtccttgaattcgttgatatagtgatacccgtccctagggagtgcttctttgtccattttgaatgtttcaagctcttcatgggtaagtggccggaagagacaagcctccgaatcggtgaatgtgtgatcctctggatcgatagactggacggagactcggaattgagctagctcagtatacgtgtaggtaggcttagactgagactggagcttatagacgatggaccgcactgctttcttgtacttgtctcttaggtgagcgcgttcctgcggatcaaccaaggaagaagccatggtggataataaggaagaaagggtaataatgttgcaacgtagagacagaaagatgattttgggggcaatgagtacgaaagaggagaactgattgcatcacaattgatgccctaaaactttaagttttagagagggaaaggatttcacgtgccagatctttaagagagaagaatgcattcaatacagaataactaagatggagagaaagaagaagcaagttgcaaagtgggaagcagtctatagaatacccgcaccgaaggtattctaaaagaccccggtcttgccaaagtccggatttttcctccgtcaagaacaagacaagaccgaagcccgccactctttcaggaataagaggcaaaccgacaagaatctaggttgctccgtcaaggacaaggcaaagccgaagctcgccaccctatcgagaatatactaacaacaagtgactccgtgaaggacaagacgagccgaagctcaccaccctttcaggaatagaccatctcatcaccccttcaggaacaagacaaagccaaagctcgccactccttcaatggaaagacaaagacaatcacaaatcgccttcttcgattaaggaactgagatttcccctaaaaggcaaagtttgcaactttttgggtgagactgaccgggtgggagatcgaggagacacattctatcaaagcatgcactctcgtttgacgggtgatcgcgaccctgatgggactgaaaaggacccaccgtcagaatcgtcaccactgtcatcatcctcatctgctcctccctgcatcgcagcaatgcgggagaggtgccatctcagctccaaaagttccatcgaaggcaatggttgtttctccttgtcgttagttctcaccgtgaagacatgccctgagctaattacttccaaagtttccatatcgaaaaagtaattaaatctcccggggctcctggacggtggagttcctggacccatgtctcggactgcggcaggtggcattcggtcattcctagcgatggtggcgcttcggaaaggaagccaatgaaatgcgattcgcatttcagtttcttcttcgttgaccgaaattggccggaatgcaatgagtccgcggtcccattgatcctgagctgtgagatccagcgtgatcaggttgcatacccgctcagtgctcactagcacaccacctggcatcagggcttgctcccatgcatcgaccttttcttcggaccagaaggtgcgaagaaagttccagacgctgtttccatcgtgctcgtcccgcgtggtcctattgatcctattcggtataatatgggctacctcaagcgatggtcctccacggcgggtcagaacgcatctagcttcctcacgatctgtcactgtcaccctaatgctttcctcggtctagaaatcaaagagatcagcagtgttccataataaatactcctgacaaactcactgggtcaccaagtatcctctttcgccgaccactggcctggggcaccgggattctgggctctgaccgtaaacgagcggcggtactggcttgtgctggagagccagatctaccacgatcaccacgttcagggcgtcggctcgatatgtcagcagcggcactcctctcgccgcgtgcgcccatatcgggtctggtttccagtaccctgggttggccagagcgagatgcttgtacatcactagcccctaaataaatgacagatattagttcagtgatataagggcagggcagacctcgtgaatacgcacaaattctcggaagattgtattgggagaaatcaaccagcatgtatcgaagcatgtgtgggttccgctcgtggcctacaaggacctccagggccttgatgtcagcgaaccatagacccagcgccttcacgcgtgggatcctgtggttgccgacagcgacacagatacgatcaatcaacgatcgtcggtggggatccgaaaattcggaaaaaatggtttgagtatcgttgttcatattatgtgattacgaaaagatgagagagaagagagagaagagaagagagagagagagttgaggggaacttctaaggttgaaagctactgcccgtttgggcgtcggggtgtatctatggatgggaaagaacacagtcgttctttccacttcactccacccttccctccatttacccaaagtatacaagaagaggagccttgagatatggcttttgttcaaggaaccagaagttggtcccttcaatccattgattttaaaagaagaggtagtctaagtcaggcatttcaggaatcgctagccacgtttttatatcgtgcacactcctctggcttgttgttccaagtcggcttgcatagcctttcgcgataatctcactattgacttgagtacgtttctctctatgatgtaatttggatctcctgggctctcatacttacagacaccgtgatgatctgcatttaaagcccagaacagaagaatccttttccaaaatcatctttttcaatcagtaaattccatgcggcgtataagaagatttgaagtatatcttaccacacgagcacttttgagcctgagaaaagtgggctaggttttataaaataaaacgaggtctagctttagggcgatatatcgggactgcttattaagcttttgtcgagtaacttagttttccaatgcggatgcctgtatcctgccttatttgactggcgcattttgagcaatttcatttgaattcacaggggacacaggtgactctcctggttcttgattccggaccatttcggaggtgaggggtggatatagtcctggggcttgggatgcggctcaacagtggcacatcgatgtacggagtcgatatggaccgtaccaaaggggtctgtaaggagcagactgggcgccattaatattaagcaatattgtgccgccatttcatctcttggcatttggccctcattgataaacagcctacatgaggctatacttgagaaagggatgatcgtcgctccaaagcgcttcaagagtcttttccttcggggtatttcggacatttaatccgaatggataatcttggagcggtgagagagatatgtagaaggttagcttcctacaaacgatcgagatctgagtctctcgaagctgatgacgaagatgattttgattacgacgctgctattgctagtctagcatctagggactagatggaatttcgcgcgggggatatgttacgatcgctatgtttgtttgcatgtttgttgtttgcagagtgccggctatataagcaggccctctcccacttctgcacttgcttcttacttctttccttctctttatcttagttattttgaattgatgcactctatgagagagaagagaaagagttattaaaagagtcttcggcccaatagcctattagtaatatcgtaatcaagtaactatagaacgagacttacttaatataacgccaatgcgaaaggtcctgtatggaggaggtcgatctccccctcttcctatcggactgtgactccaagacctcaagatagaatacaatttgatcagctctcgtccacatctgggaatcctcaggaatcctatctgtcacgtcataaaacgtatcctcgaatttcttgatacagcgagactcgacctcagaaagtgcttctctatccattttgaatgtttcgaagctcttcatgggtaagtggctggaagaaacaagtttcggaatctatgaatgtatgatcttcgggtcgatagattggacggacactcggaactgagcgagctcagtgtacgtgtaggtaggcttagaccgagacttgagcttatggataagggattccactgcttccttgtacttgtctcttaggcgagcgcgctcttgcaggtcaatagatgaagccatagtgaatgataagaaagaaagggtgatattgtagagacagaaagacttgaatgatgaaagactgatgaaagagagttagctactaagcctaattaggaagtcgtagctccgaatataatgagcccgctcaataaaagtatagtcaaaagtgatatacatttaaatcctctagctataaaaatgaggagggaaaaacgatatctgaaaagacaataacatatgttgtactttggaaccacgcactgtgatagtaatgtgcagggacgcgctaaaccagaacaggcacgctaagctcttttgggcaattcaccgtccgagtgtacggagtacggagtatacaatatagacaacaagagtcaaagccagtctgagtatagggaagaacatggagtagctgatataatcttcgggcacaaagagataccaggaaggtttgctagggggtttagctctccaaaccctaattcacccttgaacacgtcggacctccccctttcatccatgaggtggttctcaaagtgggatatcccaatattacattctgatattctgatattctaaagctatgaagctctaagctccaatatcgaccccatagaaagtacaaagatatgtatcatatccggagtctccacatcttacatgtcgtcattggtgagattggtctttgatcctaaacagagctggaccggcatccccgacggctcaatctcgcccaggcttgctattataggtcgagatcggcaaggggagagtctgactttgaccttccaaggcgctggatgtatgaacatgatatatgagatgattcacattcttttgttcctgcatgaagcacaacatacattgtattccatactccctggacttcgaatggaacatcgaagctgtggatcagtggattctaatgaaaaaatttaataaattcgagtctccacgtaaagaaagaaaaagaaaagaagaaaaaggaataaaaggaaaaacgaaatttcttccctgaaagaaaaaaaaaggaatccgacaaacagagcaaatcccaaaaaacaccttcgctcccctccgactctccttccgatatcatttcccttactctttgccaacctacccaacacacaatatgaattaactccaatgatcctatctgctgtccccaattcctgtcattctcaatcaattaaggttgcctggcagcttgatcttcaatggttactgggtctgtgttgctgacatgagttgggatcaccctgtccacaggtatgcattctcccttgatgacacccccttgtgggggtatcacattgtagtcctctattctttttatttttacaattctgtactgtatgcctatgtgacaaaaccgctcatggattcatttatgtttagcttcagctatcccaacggtgaacctcaaactccgacgaggactccgaataccttcgactcgtttcacaccccgaaactcgaatccagcttttttgacccccgggtgacttgggatacctccgatccttatgcttccagcccggagctcctccgcacgccgcagaagtttggtctaggctcgaattcactgaaaggtcacaatggggagactactggttacagggggaggtcctcggaccagaccgatacggccagacggatttgcccggtgaagcctctgccgagtatgggcgaggattaccctcggacaacgggatcggccaagtcagcagcctcgatgcaaaccccgccgccgacaagtgcatctagacgaaaagtccccgagttggatcaccccgatggacagacacaaggagaaacgccgggcatgggaggtcatttggaaacacccagtcgtcttcttggagcatctcctcggatgtttggcaacctccaatcctcgcccgatttgtttcagctggcttcattggatcccactggctcgcctttcttcccacagcaacgactgttctgggatcatgatctagacaatacgagtgaggttcctttgcccagcaacgggaataatctcaatgctcgtcagacttccgtttacccacaacacatcccccaattaccaaccattggttcagttgatgctccagactttggcaacggttttggaatgtcagcaccacccaccgatgctgccctatttcctgagccattctctacctctccccggctcccggtcaccaaggctgaggatccagctctgtttctgagttccccagctcggagattcggaggtcctcaacttacaccagagacacggtctcttcgtggccttcgacagccctatcaccaccaggcagaagagtccaggcgggaggagcttatccgagcacaggcacccaatggccaccgatccgatcctttcacggttttcccgggcgagagcgaggaggaggatgacgactacacacccaggggaatacgaccagttctaacccgcagtgcgacccaccatggcatgtctagctcatcgcggccgcacagtcaagccgggggctttatggcatccaccaacggaatccgaaagagcccaagtaaagggcgttcgtctccagcaaaatccatgcgtccagcccccttgacacgatctagttcgacagccaccggctccttgacgcgctcgtcatctgtggtgcttcgcattggacgagatggccgtgcaaaggctgaaatggagcccctcagtgaggcccccacagggttgaccgatcccctgactgggattgatctggatggctcttcaaccgagagtgaatcagatccagctgagttctcggaatatcccgtgttgcatcgcgctcagtcgtcattttcactttatgatatctcgaggcgtccactatcccggagtgattcgggctcccggcctctttcaaagggctcctatgcttccaccgtcggctcatcacactcgggtcggatgtcaccctgggctggctcttctatgggaggtgggcgagcaacgtatcgtggatctcctgatattaagcggacacccaaacggcattcgtctctgctgcactcggactcgacatatactcggggtagcgtggcatcagacttgttacccggagaggatgacgaaagtggtgatgctcaatctgcgctccgacaggtcctcaaagaacgcggccggggaccaagatccacgaacgcgtttggtaaccgactttctcggtcatcacacacctttactcatctccgctcatcaccaccccgccttggcagtgattttgacatacatccccgtcacaatgcttctcccacgactttgaccgaccccgatcttgcaaccccaggcacagagcgtcacagcaaccccagtaacggtacacgatgtgtctgccgctcgatggataatggtggccatctcatgattcaatggtgagttcctccatcggccttgatttcaaagtcgattgtactaactctcccagtgaatcgtgtacacactggctgcatactagatgcgttggattggagcgtgcaaacctgccctccgtctatgtctgtgtcttttgtgctcaaacaccatcccgacaacaccgtgcccgaacaacttatgttcccacggggcaagcccctccctctcccttggcccacaagtcattccgcttccggtaaacccggtgcgttgactgccatcttggattgcatatatgtcttggaaagaccggtgccttttgatttcttttgtgttctttccccaatcgggctctcttaaactctgcattagccgggccaccctgccccatttcataatcgcccgaaccccattaccctcatgatacctatgtactattccctcacaaccctggacgaaatcagaatagaatcatttttatacttctccgcacatctgtattatttgtagcctgcataacccccccccccacccccccccatcccnnnnnnnnnnnnnnnnnnnnnnnnnnnnnnnnnnnnnnnnnnnnnnnnnnnnnnnnnnnnnnnnnnnnnnnnnnnnnnnnnnnnnnnnnnnnnnnnnnnnnnnnnnnnnnnnnnnnnnnnnnnnnnnnnnnnnnnnnnnnnnnnnnnnnnnnnnnnnnnnnnnnnnnnnnnnnnnnccccgcatatcggagtagctaaccggtctcgggagaggagccggcccggggtctaaccccaggaaggcccgacttatttaatttcataaaagcccatcgatccctctttctcagtcagtttctcaattttactccgcttgacctcctagttgactgaacctcgccgtgtttacagtagaccctaacaaaaagccctatcaggtaccccgggccggtgaattgtatagatcgggctacggtctgattggtcaattcttacttatcggctcaccgcctttttatcaaaaaagcacttttctccgcgcggagtcatattgcgctctttctttttttgcgcgccattcacactctttggtctcattccagtcattcgcgcttcgccgttcactcgctccaatgtctgcctctctccctggcagtcgggacctgcctgcgtcgccatatgacctgaagacctattggggtcgcgtgcgccatgccgccgacctttctgatcctcggtaagttcaaatagaagatattagtggcattgagagatccccagcatatactgatcataccaattatgttaggactatgtttgtttcgtccgccgggcttgaaaacgccaagaacctgattgcttcttacaagcagaaccgcatcccggccatgacaccggagttgtggtcggcgaagaagatcgttgatgcgacattgcaccctggtatgggctcgttcaatgtcaggcaatagccattggctaacttatgaccgatcagatactggaatgcccgtcttcttgcctttccgcatgtcgtgctacgtgctctcgaacttggtcgtcactgcaggcatgctgactccaggattgaaggtaagcacctctgcatatgcaacatatgaacaacgtactgacaatacagacaaccggaaccgtcctctggcaaatcggtaaccaatccctcaatgtcgccgtcaacaacgcaaacgccaacaaatctacccccctctccatgtcgcaaattggcaagtcatacctcctggccgtctcggcctcttgctccgtcgcagtcggtctgaacgcccttgtcccccgtctcaagagcatctccccaaatacccgcctcattctctcccgcctcgtccccttcgccgctgtcgcctccgcctccgccctgaacgtcttcctcatgcgcggcaatgagatccgccatggcattgacatctaccctgtcctgtcagaggccgaacgtgctaagcgcgagctcggtgagcacgcagagccagtccaaagcatcggcaagagcaagaaggcggctacccttgccgtcggtgagacggccatctcccgtgtcctgaacgctacgcctatcatggtcctaccgccgcttatcctcgttcgtctcgagaagacggactggctgcgtgcccgtccccgtatggttctgcctattaacttagcgctgattctgggtacttcgctcttcgcgctgccgcttgcgctcgctgcgttccccgctcgccaggctatcaatgttaagagccttgaggaggagttccacggtcgtggtggtgacctaggcatggtggagttcaatcgcggaatgtaagttttgatctttggtgtttcgcagcgtgcatatcacatatccttgcataggtcagaaaatatatatacctgttccccgtttataaatgtcattactgttgtccatatagaccattcaatgaataacaggtaccactctgcccttaataatcccctcaactcgctccgcaatatcaagcaattcatcatctccccaacgccggcctatcagctccaacccaactggaacaccaagcgcagcagacgcagttttaggactccgcccagctgtattcccatattagtccaacaccaagcaccgaatatatataatcacctaccgggaatacaaatagcaggcctccccgtcaacgcagccaaaacaccattccgcccagactgcttcttcgcaccaatcttcacaggaagccgtctctggtgcggatacaccagcgcgtcgatatcgtatctatcaaaacattccgccacagactctttgagagcagcaatatactccagtcgacttcggtacgcctcgctcgtcagcgaaaacctctctggatcttccaatgccgcagagaaaacatgcgtcacggcatgaggatcgaactcgccgctctgggcaatggattccagagatcggtgcggtatcgacgaaaccagcggcgactgcaggaactcgtctaggtagtgcttgaactcgaaagcctgtgtatcgccattcgcgaacagggtttcaggactccagtccggatgactggacggggcgataggcacgaagatgatatccgcatcgtgttcctgtatcgaatccaaactcgagcggataacatcctgcacgatctcgttctcggcgagatactccgcttccgcttccgattccgattcatctgtacagatttcaggctggaaataagcctccaagattccaatccgaacctgtcgatcctccctccgaggtaacccttcatctacccccaaagaggatataccatccccatccggccccttcataaccccatacaaaatcctcacatccccaacacaccccgccatcggccccgccgcatcctgcgtccgcgaaacaggcacaatccccacacacgagaccctccccgtcgaaggcctgaaccccacaaccccacacgcggacgccggcgagcgcagcgagttcatcgtgtcggtcccgcacccgaccagcccgaagcccgccnnnnnnnnnnnnnnnnnnnnnnnnnnnnnnnnnnnnnnnnnnnnnnnnnnnnnnnnnnnnnnnnnnnnnnnnnnnnnnnnnnnnnnnnnnnnnnnnnnnnnnnnnnnnnnnntgccgcccccccccccgacccccccgaaccccgccgctagcgccgcggcggtcccgccagaggatccgcccggggtgcgggtcttgtcgtgcgggttcagggtttgcccgccgagcgaggagcgggttattccttggagggcgaattcgtggaggttagctttgccgaggattattgcgcctgcggcgcggaggtgcgcgacgacggcgctgtcggtggttgtttttaggttttgcagggcgagcacgccggcgcttgttggttggtcggttgtgctgtagttgtcttttaggattagggggatgctgtggagggctgggaaaggtttgttggtttggttgtaggtgagtgttgtggtggttttttggagagcggtttctagggctgtgctgtttatgctgatgagggctttgagggtcccgttgtgctgggtgattgctgagaggtatttctttactagccttgggccattggaggggtctttacggagtagttcgtggaatttggggattgttagctcttctgcttgccatggggagtccatggtggtgagtgttggatagaggggaattggggaattgagaattggtggagttccccggatgttgatctagtgggccaattcacgcacgccatatatggatctgcagtttcattgatggagtcaagtattcgtaattcatatttgccctaaatcggcaatgtcaattggcaagtgagcttgccatcatgtagaacccctggcgcacatggctcgggttatcctccgatgtataagaaaccgagacgaaaggcacagtcatatacagatctgagaagaattagaaaattgaaacgaaagaaacacatatatacacacaccatacggttaacaaatagacgccacaaacaatcaaatggtataatcatccggactcagcctagaccctcccagggctcccgaagccggattccataaacaggacgggaaaagcagaataacatgtaaccggcgcctttaagaatggatagaaagatagataaagcaaataaagtaaaaccggatagcagcagaggataggtccctcaaggataaatgcagcgattccggttgctcaagggccaagggttcaatacccctgccatgtggtgtcacgaaggcagccgacgcctgcatgaggtgacacctgcaggtattgaggggaaccctcccagggaccgaaaataaaataataaagagaagaaagaaagcatcgtgatcatgattttccgaagtgcaaacaccattccgtcccattcgcgatagagaaaaagattaccctcaagatatgagccttccatccgtagctggatcctgttcacgccggtgaattcccttctgatgccgttgaataagccgaatactggctactgtagctgtgtggatcgaggcctaagtgcgtgcttggcgatgcaatccttggccgatccggtaagcctctgtgccatcgtcgacaagtgtctccttgaaccacgggtgcttcaatgcctcctttgcggtgatccggctcttgggatcgtatacaaagatttgttgcagcaaatccaagaatgaacggttgaatggcgtgttggtagggatgaactcctatagacgaaatcagtcaaaagaaagccccacaggtagatatgggggacacttactgtcaaagacttcatcgcgcggacatacttccgcgaggctcgggtcgtttcagcgttgggatagtcgatcttgtttcgattgaagtacctggtaaagttagtccctatcacagaaagattgaaggggcagggctatttacttagcagcagagttgatactaccacctcggcccgccatgactttcttcaccaaagcagtgtcgattcgattgccaatgacggactccatcatcgccaggtgttcaaggttgtcatgcgtctggaacagggcatctccggtgaagaattccaccaggatacacccaatactccagatgtcacacgggaagctccaacccaggttcaatatgatttcaggagcccggtagtgacgggtagagacgacagatgaatggtattcgtcatcgaaggtcgccgaaccgaagtcgatgagtcggatttcaccatcgaggagaacgcggcgctgtcgcgcgttgcgagccgtggcatgggaagaggaagggatagtgcggttgtaagtgaaggtttggtaggcgttgctgacgaggaggatgttttcgggtttgaggtcggtatggataaggtttaggtcatgaaggactaataggtcagtggtctaaaatgcagatttagaagtgttggagaacatacaggcaacacttgtgaacagctgccgggcaaactgctggatctgactgctcgggaatggcacaaagccattccccttgaggaaatcaaacacgctttgtcctagtagatcggtgacaatgcaaatgtgattccggaaatcgaagcagtctcgaaggtggatgcatttgttgcggttgcttttgtcgttcgaagccagagttgacaagactcgcagctcgattcgagatgcgtcacgatacttttggatcgatcgtatgattttgactgcacagcgagccttgcgctgcttgtcataggcttcgaccactttgccgaatgtaccttgacctagaagtttgatcacagaatctcgagaaaggttagcatggtcgacaagatgccagagatacttttacttacatcgatctgtcaatggcgtgtcgggtgtgacaatgtaatggccatcgtcatcgtcaaacttcttgatctgggaactggtgtactgatcgagcaaattctgtcagtggacctgcacaaaagacacggtagataaaacactcacatcgcgaacgactggcacaggaacatcctttgccttgattggcggcttcggaggtgggacataactcaggaaagcatcgcctgcggtctccaactctcgtcgcttctgctcgtcgcgagtcgatttccgagtggcgcgtttccgcttttgaccgacagagccatcctcatagtatacaccattgctcgcccccgaactgccctgcgaaccaagcgaagttggagctgttgtgtgtaaagatgcggttcgatcggtcgataaagacgtggcagaggattcctcgccgtaatgttggggattgattgagaatgacgggcggtcatagtggcccaggtcataggcggtttcaatccccgttcgccgcctcttcccagcgggctgagcagccgcaggaggtggtctggcagaagtatttgcaggaggcgcggcggcaccattggatggctctggaccaggactgtcatcgatcacaatgacttccttgggaagtccattcttgtagaactcggtccaatctggtttctttcttcgacctccaacagagggagccacactggaaccactctgattggtcatagcagacggggttgttgtcgcggggggaattctcggcggttgggtgtagggaagggtggtcgttgtcggggaggggacggaaatggcgtaaggattcgcaaggcgagtccctgcggccgtggtcgaagtcgggtacgaggtattcggttggtacgaaggatggtgaggatatccgtaagcctgatgatgagaaggatgcgttgcagtggcagtagacggagtggacattgtgcacgaaggtatcccgtcacacgaacggtatgaaggttgtggagagaagactggtctaatttgtgaccgctagttgatgtcgcgcgtcaggcttcctgggtggatacgaggatctcaaggcaggactagccagccagagaagaaccaaaccaacagagattggagttgacaagcgtgtccggagggagatctctggagacgtgaagatgacgggctgaggcggtgggaggatgggaaagacagtttcaaatgcgttgcatttcctcgacaatttcaagacaaggaggtgaagcaaagagcattggggaacttggcgacatctgtggtaaacgaggtggggagggaagggcctggaggcaaaggtcagtgatgatggaagagtcggagagttgggacccgttgccgatcaacttgggatttgagatttgagatttgggattttgctcctcttaattcgtattatcttctatagaattacactcgccgcctggaatacagctaattcaggctaatttatgattgtcctgttctttttacttcttgatcaagtttctcaagcgttaaatacctaaatacccatgttatacgatgttcggcctattccctatagtatacacagaaaaacctcaacccagaggcccatgcgcctctagggagaaaggcggatattactttctcattccaatacagccatgaatgtaattaaaaggatctaaagtcctagatgggccttgaggggcccccccagggcccgccaccggaaatggagcatcgcgtccaagccctggcttagccgaatccaatccacaaggcgcggtgaacatctgcggtcaagaatattcagaataccaagaataccagtatcgaagagtatatcaaacattacagcccctaggagatccaggaaatcgcccgtatagttaccacctgacattctcactgagtcagcatctaaatcgggaaatacgcaagccaattgcgtacaggcatattagaactagacgctaatcagttagtcttcgatgggctaatggtttcatataagagtgaaaaaaatcaaccggggagaaggggttttatagagactataggaaatgagaccttacatatctatgtccaggttgccttgtcattacctaggctacagttactggattaagttcccaagagatatataaaagtgaggcaatccaaacagcctaggtagacaccaatgctaataacacaacatatctatgaattgatatccaatgattggcagggtattccgtacctttgactgcctcggctctaaattgcctcaactggacatctttaacgccaaccaaatttagtaatttgatatgcgcctagttaactagctatttactatttagactggctagcgtgtggctgtgagaactacaagatttaaatagcgatcttcacttggatgtttataatcgggagaaccaaacacatagaatatgacagtagagaattaatatgatccaaagcaagtctcatttattgccttgcgctagaggaaactatccaagagcgacgagagtaatttaccgaggtatgaaaaaggccctggttcctctatcctcttaagatgtaagctcaacctgtagttgagtggaattaaagatcatggcctgacaacctgacaacccccataaaccaacgccatcatacacacgcagagaatgcaagaactcctggtgcccggagccacagggctcccatgggccaacaaaaattaggggcataagaaaataagattacaaacatttatgacccagtcagtttcgatcgcgatcctctctgggatccttcaggtagcccctctgcacatgtctggtcgcccgtccatccgcctccaacatgaatagaaggtctctgacctgaatacccattcccttctcttgatcttcacgccatattccgaggcgacgctgagcgtgactgggtgtggattcaccgacaccggacttctcaggaccggcggtgggcgtggaaggagttggacgtgagggagacgagaacccaccggatttaccaccgggcttcaaccatgagtatgactttttggcgccgaacatactgcggccacccccagacaaagccatgcgtgccgtcgccacagactgtgcatgctgttgggcctcggttgctttggaatcctgcattttcttcgcttcttttttgctaattgactttttatcgaaactaggcgccctttcgctgaggggcgtcgagggcgcagatcctggatcgacagactcggctcgaccagcctcatcaaggatggcattgctgttgcgtttagcacgcttggctgcgcgtttttcctcttgcgaactctcccggtgtatgaatgctctgtaccttgccgcatttggctttgcactgggcgattcaatgctagcatgaggacctgtcaagtaattagtaccaagtcagttaagtggatatgataagcgaaaccatacgtttcacgggggtttgagtgctccccgtagcctgcccagggggtttcgcgacatctttccactcaatgggaactaggccatgagaatgtgctcggcgacttcgagcaagagtcgaggcgtagtcgatgacacccctgaatctttcttcggtagaaatagataggagattcagtatgtccacaagaggagcaccttcctggttgagaattgtctgaccagtgcgcaccacagaagagccatccggaccagtaacttcaatcggctgtggtcggccaggtacagggtgaaaaaggccttccgaggggattcgaacaccaaggtcaaagcctcgtttctggagcttctgttcgaggagttttgtgatcaagaacggttcttggatatgatactgtgctcgccttgctgcgatagtgtcctcgcgagtcggttcgttgggatccttgaaggggacatgtgcctgagatgagcccgcgaaagagtcgtgtgtggtcgccggtttgatatgaggcaaatcaccgaagctagtcgaaggggttcccggggtagagccttgagaagtgaaggaggtattgatagatggcgggtattgagactgtgatccgcgatggggagcctgcgcctgcgcattctgccctgaaaagctctgtgtgagaaatgcttcctcttccctcacatcaattccagatgatgctagaacatctgtcagttcagcagcatctgttgttttgtccactgggcgagacggaggacccatagtcccgggaggagcgggagcagatgttgcagacatgttcatattcatgctcatattcatcggcgttccgttcatgggagatggattatgtggtagctgaaccgcgttgaagctcggagaaccgtagggagattgggtttgagaaggcggtagaggagagaggcgaggtcgcttggatggagggggtacagcaccattcaggggagatgctgccgagttgggagatggggacgagacaggcggggagaaaggttgagaagaaaactgtggcggcgggggtgcctgctgctgtggatgccgagcttgggccatggcgattgtcgattgtcgattgatgggatttgaaatgaacagaggctattgcgccgagccgttgtagctttgcgaatgaatggaggtccacgcgtggccgttaaactgagcggattgctcgcaccaccagccaccacctttgaccatctcaatactgaattcaaaccatatgtacgacacgtgaatgttagaattgttggctcgcgcgcgaatctagcagtaatcggggagacagtgatgcgtgacgtggtaaggagctttctaggtggtcgaactctgctccgcggatcgcggattgcgacacacgtgactaagtttgactaagctctctgaatctgcgggtgtcttggtcgcaaaagatcaatcttctattgaatcacacatagtcctcataagtatattgacacctgcttcaatacccggagctgctccattcatcatagcctttcgcgcaagttatgggtgttgcgctgagctcttattgagatcctaggcttgatcgtgcgacgcgcgggtgctagtccccttcaactagacttcttaaactcatattaaggaatcggtcaacctactgacaccttgcccaattaatctctaacacctctaacacctctaacaccatggcgtccaaacgcaaagctgcagcaatgggaatggctggtgacgatgagcccgttgacccatcagacgaactggcattctactgtctcggcggcggcaatgaagttggacggagttgccacattgtgcaatataagggcaagacagtgatggtaagcctcagctgggacaaggaatgaactcgcagatactgatctcctttgcttctgtagcttgatgccggtatgcacccggcgaaagaaggcttctctgcacttcctttctttgatgaattcgatctgagcacagtggatgttcttctaatcagccagtacgtgcatctctttttttgttttacatatatggaatcatggcaagcacgaccgggcatcattctgcacttaccatgaggcacctggcacctgctgcaacggaaggacacattcccctgcatatatatgagaagcccaatacaatacattgtcatgcatatatttcttgtatcactgtaccctcttgagtttcgaattcgaatgctctcctggcgcgtttgttcacggctatcgcagttgactaacggtctgatctgtatagtttccacgtcgaccattcttccgccctcccatatgttctcagcaagacaaacttcaaagggagagtcttcatgactccagcaacccgagcaatctacaaatggctcattcaagacaatgtccgagtcagcaacacatcctcttcctccgatcaacgcaccacgttatataccgagcgtgatcacttgtcaacactccccatgattgaaaccatcgacttctacacaacacatacgatcaatggcatccgtattaccccgtatcccgctgggcatgttctcggggctgccatgtttaaaattgatattgcagggcttgtgactttgtttacaggaggtgagtttgctttgttacaccttggtcatcaacagcattatatgtcaattgctaatcgaccgatagactactctcgcgaggaagacagacacttgattcccgccgcggttcccagtggcacgaagatcgatgttctcatcacagaatctacattcggtatttcctctaatccacctcgattagaacgcgaggccgccttgatgaaatcaattacgagtgttctcaaccgcggaggtcgagttctgatgccagttttcgctctcgggcgtgctcaagagctgcttcttatccttgatgaatattgggaaacccacccagaactccagaaatttcctatctactacatcggaaacatggcaagacgatgcatggtcgtgtaccaaacatatattggtgctatgaacgataatataaaacgactcttccggcagcgcatggccgaggctgaggcgagtggcaataagagcgtcagtgtcggaccatgggatttccgattcgttcgaagtcttcgcagtttggagcgtttcgatgatgttggaggatgtgtcatgcttgcctcccccggtatgttgcagaccggaacaagtcgtgagctgctggaaagatgggcacccagtgaccgtaacggcgttgtcatgaccggttacagtgttgaaggaaccatggctaagggattgctcaatgaacccgatcagatcccggctgtcatgtccaaggtttccactgggcatggtcgtggtcgtgttccaggagtgaatgatgaggatcaaaaagtcatgatccctcgccgttgcactgttgacgaggtcagctttgcagcccacgttgatggcgtcgaaaatcgtacttttattgaggaagtaggagcaccagttgtggtaagtgtgacatccacccagtctatttgaaaatttactgacccactcaagatcctcgttcacggcgaaaaacatcagatgatgaggctgaagtcgaaactgctcagccttaacgcagataaaatcgtcaaagtcaaagtctacaccccagcaaattgtgatgaagttcgcatccctttcaaaaaagacaagattgccaaagtcgtcggcaggctcgcagagcttgcgcctccatcggagaatgatgatccccagctaatggctggagtcctagttcaaaatgggttcaacctgtcgttgatggcccctgacgacctacaggagtacgcgggcttgacaaccacgactattacttgcaaacagcatatcactctcagctctgcgagcatggatttgatccgatgggccctcgaggggacttttggggccattgaggaaattggaaacagcaagaagaccgaggctaacggcaagaacgacatggatagcgacggcactccaaagcaagaagatgccgacgaggagatcccatcggacgagacacagacattccttgtcatgggatgtgtgtatcttcgccatcactcccgcacccgcgaagttgagttggaatgggagggtaatatgatgaacgacggagtggcagatgcagttatggctgttttgctcacagtcgaaagcagtccggcctccgtaaagcgtatgaatttctgtccttgtccacctctttacttgtgctaactacggttatagaatcggctaaagacaagcaccaccatcatcaccacgatgatggcgaaatggaaatcccctcacttcccaaccctcattctcagtctggacctcaagagcggcttgctcgtatgctgatgatgctcgaggcccaattcggcggcgataacattggccccattgagcgcccacgaatcccggcagatctcgcactcggtccacaagaagatggcgagatgaacgaagaacgaattgccgatattgaggctgccgagctggatcgtcttatcacaatgggtgttcccgtccctggtattgaaattagggtggacaagcatattgcccgtgtgtggcttgaggacctggaagttgaatgtgcgaatgctgtcctgcgagaccgcattcgtgtagtcgtcgagcgggccattgagactgtcgctggtctgtgggcagagagctcgattcaccaggacgcggtgcttaatggttctgtcaacgggacaaaggggattgaactggctgataggaagaaagcggctgccattgaggctcatgcttgatctctgtcatacttgtataataatgaaatatttccatcatccatgatttgacttgacttttctacatctgcttcgtcatgtagtgtttctttcggtagttggttttttttaacaagagaatgagattgattaaaatattgcacgttccgaggatataaaagtagactcttagagtagatagatataagtgctttatagcgaggcaaagacctcctgcagaactttctccagggtgtcaacaataatatcaatctcctctttcgacacaatataaggtggcgcgagtgtaagatgatctcccttaattccatccacggtaccagagcagccatatagcgagacactgtactccggctgtagacccttctcctggatccggtaagacagacgatccttggggtcaaatggctctttcgtagccttgtctttgacaaattcaatctggaaagagttagtacatttttttgtcgtgcaatatctactacaggaacctgcaacttacaccccagaacaaccccttcccacgaatatctccaacatgagggtgactctcgaatcgctgcttcaatcgtgtctcaaggtaagcacccatggtccggacattatccaccagagactgctcctgaatagtcatttgcacagcaagcgcagcagcacatgagaccggatggccttgatatgtctgtccgtggcggaactgcccggtgcctttgtccatcgtctgcacaatagagtcaccaatcaagacggccgacaccggcgcatagccaccacccagaccctttgcaatggtctggatatcgggaacaacatcttcttgctcccagacatgcaaggtgccgcaacgacccatgccgctcataatctcgtcaaggatcaagagggcgccgtgcttctcgcagacggctttcatggcacggaagtaccccggtaccgcggggacacagccgagagcctaactagtataagttggatgatctgatagcttagagttcaatataggaagtcataccgcgccgacaaccggctctgcaatgaatgcgcacacagtctcgggtccgacacgttggaactcagcctctagctcggctgctagacgtgccacatagtcagcatcagactcaccgtccagcttcccacggtatgcatagcatggtgaaacatgggatacattcttcgagagaagtggttcaaacggctgccgacgctgaacatggccaccaacggaaagcgccccgagcgtggtgccgtggtaggatggaagacgcgcaataaacttggtacgctcgggttggggagttggaagctctaagaaatattggcgtgccagtttgagtgcagcctcgacagcctcagaccctagatatcctcagcactgtatgtgtgaacagaatttcgggttcttggaagggctgcctcgactcacccgaactggttataaagaccttggatagttttcctccagtagagtccactaggagtttggcaaggtcctcggccacttgggtgccgaagaaggcagaatggcagtaagatatctggtccatctggtccttgatcgtctgggtgacctgttcgttaccgtgtcctagacaagatacagccgcgccacctgtggcatcgaggaatttggtcccatcttctagaaagacgtagcaccccttgccaccaatggctttctttggaacgaagcgtgtgtcccggtggagaatagcactagccttggtttctgggaaataatgtcagaaatatgccaagatattgcatgtgttgacataccgtcggtcatgattgaagtttatagaaatgtatttcaaagaaagaacgcccgaggagatcaaaagccttatatatacctgtggatctctctccgatggtctcacccgaggcaatgcccctgttctgcggggctaagtgggttcggcataccgaagggaagaagccgggccctcaattggaccgggaacggactttactgtttcctatcttgtgtatctggtctatcgtgtttgaagagaaactttagttgtagattggcgtctggaaatgactcattcttatgaatgcctgggtgtactcgggaaagatatatctgacgttgagttatacttcgtggttcggtttggataaataggacactgcatagagcatggggctcatatatttcatagcaaaatattgataaaatagaattgaccaacagatccctaattatttcccaaacacaatcccaaaagacataactagggtcattattaactattatcaatcatattgacgtgcacttggtcgaacgttgaacagacatccccacgtcccaccgcccgcacactgcattctgcccctcttacttggccacaattcccgcggccttccccagacatttccccatctaacacatccaaccctccacaatgtcgcgtcgcgcccaaatcgaggaagtttccgactccgacccagaagagatcgccccttcttacgactctgacgaggaccttcccagaaatgccatcatcgcacccgtaaatatcccgagggctgcacctcaacctcaacaacaacagatgcccatgccccagcccatgccatcgatgccggcgcctgagcctcagcgcgagattccccgacacttctcatgcttgtaccccgtgtacttcgataaaacccgatcgcgcgccgagggccgcaaagtcggtgcggagctcgcagtggaaaaccctcttgcgcgagatatcgtcgatgccgtccagatgcttggcttgaatgccggcttggagccagagaagctgcatcctaaggattgggcgaatcccggtcgtgtgcgtgcgcaggttaggacccaagatggtcaattagccaacccgaagatcaagaacagtacgtggctgatgcctttgatggagtgaatgcttctttctgttggacatgaactgacattgttgcttagagcaccacctctatattctcgtcgcacagtacttgaaggctaaccctaccaccgaaaaatcaccctaccggctacgaatccgtggcctgcccatgcctgagaagcttccagcagctcctgctgccccgcggggttggaagatcgggacgatcttacctatccactcgcctgcctacagcggtggtggtgtcagtgacaaccccctcaaggacgcaatggccgagatgcagggcatggagggaatgccgaacatgtctgaaatgatgagtcaaatgggcggaatgggtggactgagcagtatgttgggtggactaggcgggctaggcggaatgggtggaatgggcggcgagccctcaggggcaggcgcggaaaagaaaaagaaggaaaagaggaaggtgatcagggcatgatttagcatgccctttattccgtgttccaattgcattgtatggcgatgggcgttgctttttccccctaatttttgatgcactcgagaaagggatacttcttgataccacggatctgcatctgaattgatctcattgtacatccacctcaaatcatgtccaacacctacctgatagttgtctgtcctgtatgaatcgaacatttcttggactagcaagtgccgataaaccataagagacctaccaagaaagaaggtggagtatcagttctaaacttgcatataactatgttatgcaaatgctttagtagtgctgagtttggtccgagggttgatctagcgggattcattcaagaagcagtgaacgataagtcatgttctcatgcaagggccggcaaatctatgtactagctaaaacggacatgttcatgggtatcattatcatgcggtgtgtgtttctgtgccgtccgggcatcctccatttctatactgccagagccgactaaagtccttgacgcgcagtactcgatccaactcattcggcggtgaccgtcgcacggtcaatgcgacagggagaaacgcctcgtctcgggctatcgtggacccaactcgacgcggaggaccatcatatccatttataccggcggttgcccatggctcgacttccatatccatgaatgaattggagtcgaggacgttcatatcaggacctagggtaaacatgttgccgaggtaatgcatgttgaacaggtggcctgaatgcgggcgcacgaacagccggcccatgtatcgattcgggatttccacgaagtgaagcactcctccctgagccacgatgtcaccttcattggcgtagtgctcgatgtggccgatggactgaccaaattcaggcgttagatcaggtgctgtgtttccttgtggccttgcgagctttgtccatcgcgggttgttgaagtgattcgcggcatttccgaaggtgtatacctccaagtgatgaaggagattgtgtggtagctcatccagaagccagtccatgacaaggcccccttcaataccgccttgactgtgaagaagcagaaccactttatcacattctgggtctaagatagcttccttgaccaaggaatacgctcgtcgtatatcgccagtagcgtaggcaaaatctcgctgaatcagacattcaatgagatcaaatatgatgccagcgctagattccattagtatttgcaagtctgaaacccaacacgttacttacgtgcgattgtgcacggccgtcactttccgaccaaagatgtatgacagttgatcgatgttcatctgtacccagtggtgtctacaggtaatttgagttagcaactgaagacagagaactacggagatatatctcctaccccgctgcaattccatttatatacacccaacgctcccgctcatgacttggtcgctcgaccacagacacttgagataccaggacccgctggaagctgttcaacatcaacatgacaatcgaataattcacagtgaaagcaatagccgaataaacaatgatccacaggccaggagccatgcagataaccatgatcggcagcgagagcaggaaagcaacttgataaaccaagagaaacacatgggtcaacaccgtagatgcattgcgtaacgacggatagagctcgtccagctcacgggtgtgacctagattgaggggccgtagaatacctggaagcgcccatagcttcgagataaacagggacaagtcgctcgagagtaacttggtgggcgaggcagtgtagggcaacggggtatcctccttgcccggacatgtcattgtggaacgttgacaagagaagaagtgtaacgttgagatgaaagtggacatgaaaaaggcgctttgttgtcttgtcatgtgatatagcgcctgcctataacctcgtgttcgtgagatctatacgagcttgtgacttacatcggctgattgacctacaggacttttttggaatgtggctttttggtttctttcatattaagtaattacagtgatattattgttctcattctttgattccttccttcgatgaaacttgaatctccgtcatttcgcgaagcaaacctgggagaggcgcttgcaatcagcgtggtcgatgttctgttatagtcaacacacagttagctatagatcagataatgggagaatatgaaagggaggatattaacgaacaccatgacgcatttttcgacgattgttgcggcggaacagatatcttcggttgatctgcataccggcatggcgaatctcacttcgataccattttgcaatgtctttggcggtactggcaatttcaatgtcgctcaaattccagtatcctgggacacgcagggacaggcaccatttgacgtcgtgatggacgggctcagatgaaatgataccgtctcgggcgacgatgcgagccaccacaaggtccatcaaatcttcgtcgtcaagttggtgatcagcccagttgaagaagacagtcacccactggtttcttccagcgggatagtgtttttctcgaatgtttcgtccatctggatagttgaacattccttggagcttggtgcgcttctttgcttcctttgtgactggagaggagtcaacagacgagattggtgtttccatggtggaaatgtctgagatagagaagaagatattggtaagatagaacaggaagaaagaagtgagtcgagaatgagacagggtgagtttaatatctacatactatattgaatggaacgaaaagaacaaagaccattgatggtttttaatagtacaattcattgtgattgagctgtagagcgattaataggagcctttgatgatcgcggaagttaaccccaatagtgcactacaataaagctttgtcctttgaggactgaaaacacattgtttagctgagctcacattatgatgaaagcacatcgacaacaagctacttcattaggagtatataaacgtccgcaagacaaaattctcctccccaaacaggatatcaaaaccaaacccaagcccctgatccagcccagcaggacgctgtgtacacaacctgcgataggagtgaacaaagacagtctagtgactacatcccattccaaaaaatataacttggaaactgacctcctcatattgtttattatttaggacagacatatcgtctgaaatctaccacagggctaccacgacccagccctcctttaaaactgtgataaccaaaagcaatgggaaaagatggagggtggttcgaaaacagacgagacacaagcggtagacatagagcccctttctcaggacaaagagacacccggtttgtcactgacctgagaagggacgaaattagaaagctaacagagatcctgcacatagacaacacaagagcgagacacactggtgagatcgtcaggcgtatgatacgcgagttgccgaaggatatgcgccgtgatcgctggtcaagaacgaacaagcatctgtgcgatgcccaccagggtctgaatgcaaatcttatggccgatgtgttcaatcttgttcagagggaggtcggtcaccacctccgcaagtttgacgcgtacccggacctgctgaagcccctcgatgtattgatcctgcagaagctgcaggctatacggggcatgtgggagaaacctgacccgaaaaacaaggctgtctcacaagcatggcactatgagatcagctgctgtcaggggtgtatggtggctcggattgcgagtgacaagcatgcgctgcgcaatcttcgaatcgctttgctctctcgcacgcagacacgtctgaaccatgccccacgaagacttatgaaatttgtcgatacctgcattgacctattccctgatgacgttgatgagctgtatggcacatctagccagtttgcattcatcttgaaagatacccgcaaggcctgcagcaaggcctgggccaaagacccagcacatgcggattcgaggaccccacagcgaaggcacaccgaccatgacaagatcgacaagggtgacagaaacgaaaagatcggaaaggatgcacatagccatcaaccagctagtgagtatgatccgaggaagaagtatccccagccaccaccaccaatcacattatcacaccctacggaaaggtatgtccccgaatcatcccggtcaacttaatgtactgacactgacactggagggcgcagaatatatcgcctgacgtcgggccattccagatggccgtaagatcatcgtaccatacggagctagatcgacgctcagacccgaacccggaacgcatcactagatttttggatttcgccgatgacaattaccaaggcttaggaataagcacggaaaggcaaagtgcgagcactttttatggacaccctggaaaccccccgtcaccgagcaccgcaagcacactcttgggaaccatggaggaaatggacaaacttcttgagatgtacaagggtatgggagcaaacccctactcgcacagcacgcaatattgttcattgcatgggggtagcggtgcctcatcacagtgtcgttccccgtcgatctattccactggcagtgaatggagtgacgaagacgaagactggaggatgccagaaagtggcccagcagcgaggaccacttggaatttgttgtgtgaacagtcgaatatgatctgatcgcttctttttgtcttcgcatctcgcatgggcgctttgttcctcgtgctcttgtgccccgtcatttccttttgatgccatttggtttttctttttgattgtatgtcaaatctggtccgagtcaggtgttctgagaatatgatatttgcaaatgtatccgagttaacgaatacccaaaggaaagaagtaaatggcaaataataaacattattgacagtaggtcatagagcaaaccatgtacaaagcattgacaggcgcattctgaagtattaatacattgggccattgatcccatatacaaaaaataacggaaagccccacagtctggcggagtccgccagcagctccagggacggggttagggggtgcgtagaaaaatcaacacgttctcgggcttcatttcatcatggcttcagttgtggagaacacttccaggaaccccgtgactcgggcccttgagactatcaacagtctttcggcgcagccgagtgcgggccgcaggtccctcggttgataccaccacccgctcacgctcacgttcacgttctccggtcaaagtcacagctggggtgttattaagcgcctgggcagcatccagatccacctgcttctgagcgttctcccgagctcgctcgtagcgcggcttgacctcaccagtccaccgagtgccaagaaggcggtcccagaagatgaagaacggctgggagaagttggtcttgataccccagctttggtgatgaatgtcgtggtaggcggcgttgttggaggtaaaatgctgtagtggatcccacgggaaggcgtagccacagtgatcgtcgacagtcttgatagtcgacattgtaaaaaaccacatggcctggcgggtggtcatgccagagaccaagaacccaataccagtgccagctgtgtccaggaggaatccctcaaccggatggttgtagagggcgccgaaagcataagggacgtaaagacggtgatggcgggagtggaaagtcactaacagctggttagtatggaatcatcattcaactttgaaacgtcagacataccatagagccaccggttcagatgcatagcgcggtggaggaagtactgccaggtatccacaatggaaatcgctagcatgaactggagggtcggtataaagtaccaatatatgaaactggcaactgcaagttcccagctcgtgaacgcgggcgccacagcctcggctccgttgtcgaggattatggactgggtcacatcggggtatgatccaccagccagagctccggccaacatagtataaccgctttgggacacggattttccaagactgatagcgtcaactccaacaagagctaacaatgacgggaaggccttttgtgcgatccgcaatcgctgcgcccacacggcgacatcatattcctctctgccaacagtttcctcggcatcaaagtataggaatgcaagaccggccacggtctgaatcacctgttgtaagacaacatcccgcacaacttcccagcgagtcactttgtttcgtttcagaacttctgcgggggtgtggaggcggtattcgacgaagtaatcattaacatcgaggtaatgatagatcatagacaggacccagtatgcgatgacgggcaatacaagcgaaaggatgttgtcaggaagaaaagcaagcagatgtccttgtggtgtcaaagtgtaggttggtaggggaggaaggtcaaacgcgacggatgcgttcatagccatgacgaaaggatggcgatgtgttgaagtgtagcacaaatatccaagagtgccgatcaaaaggatctcggaatcaatatcttggatattgaaatggccccaaggtcagaaatcaaacgaagagtgaacgtctgcaactgcccaccacgtcgaagtccggatgctgacgggtaggcgcgacgcaagaatgatttccgatcagtcagagacctctcggagctggcggttacatacaaaaggaagtatgtaaaaagacgaagagaatcagataatgataatgaaggaaagaataggaacggccgaagaagataaaagataaacgttcagatcaggagacgcccggattcgggtggcgcgagccggagccaagacaaaccagtacgatacacgtattattggtatctttatagatcgactgatagaaagaggcaaaatacagtatggtatggtatggcatagacttatgctgactcagctttatacttcgacctggacagccctgaacgaaagtaaattggttgctacagtgaaaaagaatctcaattgatttaaattgaatgtttcggacggcttttatcgttgaattggccataccccttaatttgccggtatttatataagccattgttgccccaagaatgacattgtgcctgggaagtaccttgaagtacccaatactgcgctaacacggagccagtggcggtggcccagactctccgataccgatttggtacaaaccgaacaaacacaaagtcccccgctctattttttttttttttaaagaaaaacctcgtccccccaccttgaaattgtttttcttccttcccgtgctacccttacttttttactctcttcgtcttcttaacgtataattccgccaaaatgattatctacactgtatgtttgtcaatatcaaatccttagatttgtccctcttcctgtgtacgctctcagaatctcaactgacacccaccaggacatcgtttccggtgacgagatcgtcgccgatacctttgaccttgtccccaacaaggacttcgatgtcctttgggagtgtgactgccgcaagtacttgaagcgtgccaacgaggacttccagctcgagggtgccaacccctccgctgaggacgccgacgaggaaggtggcgagggcgaggccaccatggtccacgatatcgaggaccagttccgtctggtctggcttaaggctgaggatggcgcgaagccctccaaggaaagctacaagactcacttgaagcgtatgctcgtcttttgctcctcacttgattatccgcgcatccactgacttctgttctttaatatagcctacctcaagaagcttcacaagaatgcgtcgcccaagttcgctgaggccgctgatcctgaagccgccgagaaggcctggaaggccaaggccgccggagctatgaagaagatccttgccaactgggacaactacgatgttctcatgggccagtccacggacggtgaagccatgtaagctcacgtatcttcccaattttttttgaatattcgactaatggtttctaggcacgtcctgattgacttccgcgaggacggtgttaccccctacgctactgtctgggctgacggcctcaagccgattaaggtctaagcaactcttgtcatcccaaagaaggcgatagttaaaacatacgcaccctacacgaacaaatacgtcttgttggaagaattgcgagttacagttcagacgcagcggctacttattccccttccctgggcctgtctgttctaataaccctctcgcattttgtatccccgagttagtgatccactgggtccccaagagttacgcttcatgaaatcatctgtcatgtcttactatttttggcttgtactatgtaatctgtcttctgtcattggtccagtccttgacagtaactcccttgacttgagaaaagaatgagtattgagaccacccgaaaaaacagtttcttacgataaaataagtaaagcgataccaataattacagggatactagttatagtgagttatatttgcagatcatttgattattcatcactcataataagcatactaaggacatcccggccaatcacccccattgttcccattccaggacggaaaattcccttctggagggcaacctggaagtggaagaccattggcatctaaatcaggcatgttgatggggctagtaccatgaaatgttgaggtggttaaatcaagacctgagacgggatccagttccatcagatcatctgcgacaggaagatgttgcccaaacactgcatcccactgatcccaatcgaagttaaggttggggtcaaccatcgatggaggcgtagaaattctaggtaaaccattaggacaaacaggatccacgaaggacatgccgccagcagcagtaatatcagcgtctgaatgctgaacgtgtgggacagaaggggtggatgcagaacattgtgtcggtggaggtgcgccaaacaaggaatccgtattgggcgaagaggcgccaatgcggggaggtatgagatgattggcggggggaggattgaattgggaatgtgagactgggggtaagtctttaccccgtggttggtattggcatcgcagagggcttttagtggcatccggggtaacaggatccgagaacttgtgagagcgggtgaggttgtagaatgttttgacgaaatcgctaggttgggatttgtgtgttgagggatggccggccgatgttgaacccgaagagtcggcctgagagtgatctgagctaggagagtgacaatccccgcgagtgtcaactggcgaagcgaccccagcctggatctggtcttgttcggtccagagcattcgcggattgaggcctgccttttgccaagccttctgacgaaggcggcggatcatatcccaggcttcacggccaccgtccttcagtggccgttgtgttgaaacaccgtcttcaccacctacgacgcctccatccgggccagaaagtgcgagtatgctgtcgatgaacgcgcgggacttaggtgcttcagggctgtaaggtcgctcatataggtcaataagcatgatcctgtatcttattagcgtgatcaccaacacctaataatggagtcatacatagtagcatgcattggttgatgattactaaaaatgaatatcagttgcccatgattcctggccaccatactagcggaaaaacttacccaggccagctccaatgaaagggctggaaatcaggatccgttgcgagttggatgaatttttccatgaaaccatggcaatgacgaagtgcactatcagtattagcacatatactcatttcccgatggtgtgtgcaaacctttggcgtgccgctggccaaatccggctgcgagcattcttcaggaaaggctgataggctacgcagaaggcctagaggaaggttagttgaatacgaaaccagcaaagagtgagaaagcgcaccttgtcaatatataaagaaagaatgatcttcgcccatttatggaagcaaataagaaccggtgagtgatattgttctgagcatccggtgggaccttcgcctggaagctctgtgtcggaagagcggccatcgggggatttggatatagagaacgctcgacctggcgttgacaggttgtcaacatctttcccctctggaatcctgttgatgatggaattcagtctcagctgcaagtcaaggagtattgaccggagctcctccatgtcctgcctggtgaggggctttattccaagttggattttcaatattcggcgaatagcgcctggtaaagattagtgggtgggttttcaggggtttgaaacgaaaaagggtacacacgagccatggtatatttccctctggcggtcagatagtagacattgaccattgatggtccgccgcaaatagtgggatcatctggattatcaggcagccgctctcgcgaagcaacctgtttcatataggactctgcagcggggctacccagcatcgtatctttcatctcactagtctcgcacacatcccaataattctcgtcgttgacaagtggaggcagaccgcttgacatcgcaacgacacagtccatgtggatgatgtgccaccataaacggcgccggtactcagcttcgcatggctctatgccaaacttagcgggatcccgatgcaagcccatggtttgcgcaaccctcatcgcaagactaacaaagagactagtcgtcaaaggctcctcctccttcgtgacaattgtctgtacgagaagataagcagcgaggccttgaagtgaagggctgcgcgggaatttgatcttcgtgagccatttagtaacttcttcagtatagattgtcgaaagggccgaccgcgaggacacattaaattcagcttcgattgctcggatcgaaatagtcactgagccgccataccatatcgcgtataacagtgggatgaatgacggatttgggcacgactctcccgaatagctgctgtagtcgtaccaatcccagaaggaattgtagagcttgaggatagttggggggtgaatgataggactgatagcgtgtacaccggaaataaatcctttgtaaagaatatggctttgccgtctcgttggcatgtgatcaagcatttctggctccaccaccttttcattgatcgagggggagtcacccgaagggaagattatagattgttggaaggaacgagacctaggcgccatcgaaggtgccgagctgcctattgattctctccatgactgttgaccatcggcatgcgaatctgttatgtcttcattatttttttcaggagtagactgatcatgtgagctattttggtctctcagtaattgattgagctcattgatctagatgcgagttagtcaaactgtctgccagttggagagtcgagtgagcagcatacttcgccagagatataagcccaatacgtggtgccaacatatctatttatttagggttagaaaaaaagatttgtattctcaaatgaagcaattttgaccaaccttgaccttccaccgtcctctaggctcaaatggcctaagttcaaactgccaaccgggtctaccagatcggtggcctgaccggatgggattggaaattcatcgctgctcgattctgcagcaatgcgacgtggactggtagatcttggcggtgttttatttccgtccagactattgctcggccgtgagtcatccaactgtgtgggttccacggccgttgcctgtatctctacgtcctcgagtgtttgaccgttccttccgaggcgctcaatcattgacataagcttatcgagtcgtgattcaatggcgcttgggtcgggcttttcgcctgtcgactctgcccgcttcaagtgtccgtaaagtgattggagctcgtcgacgtcttcctccaatgtccggggcatctctcttcttcgtttaatgccgtgtatattttggggagacccatcgcgcctatcgtcatctttttgggatgacacatcatatatacactcggtgttgttcttcacacaatttccacatatagggtgtatctagaagagatatgttagcctgaaacaggggcttgagtgttgatggcaggcatatcaatctaccttgtcgcatttgaccttccgacgccgacacgtgtgacagctgtagctcgcgcgatttcgggtgatctggcggcctccagccaaaggtcccttcaatgatgacggagcagacgagttgccagggatggaaggacccgatatgggctgagcattgggtgggctctggttcatagtccctggcaagacatgaaaatagatcaaattgttagcatgaaaacgagacgcgcaaaaaaagaaaaaacggcgcttcgccgactgcgggggttccctgacgttatcggagaccgaagcccaatgatatcactccatgccgaggtcagcattgatgcctgaatttgcgggcaagaatatgatttgttgccttgctgtcactagtactagggcttttttttttttttttgccaaatatgccagtaaatttgtctagtttttgatgtataatcttccatctgtgcgcaggagaagcctttagactactaacacgtttatggcaagatatcggggcaagatcttttcgatgcctttcctgcgctgttcaatgctgtgtgtgggtttgtcaagaaagctcagaccaaaagaagagacaaatattcaataaaatcgtattacatgtccagctttacctaggaactattatgacaggaactaaaactgtatgtctaagccactgtcagaagtcggacagggattctagtgtgcaatctgtgatgatctatagattgaaaggaatctttacaagacatgaatgattcaaaagcagatgttccatagagatctgcatagcgccattttatttcgggctgtctgcagtgttctctcgtagttctacctgaaacccgacggtatactgcagtattgggctccttgtttctcaccacacacgctaatgcaagagcgcctcagatgatgtctcgtagccaaccaatccaaaaacctgaacgctagccagctgtacattcccccctccccccctcccaaaagaaaaaagcaccaagtggcctagaacttgggattcgctgtaaaaagaataacaagcctaacatttaaatcctgacgatttcccacgtattttcctagacaatattgcatcgaaagctaaataatattcacaatgagttttggagtgagcatcggggacttcatttcggttcttactttggctaataagctccgaagagactttgttggcgctccgagccagttcaacagtatctccagagagtgcgtcgatattgtacacctaggttgtcggccagtaactgataattttggtcttacagggtcagagggctggcaattattctccaggatgtcgatgttcaactactaggccatgatatcaatgatcaacaacaaaaccaactagggcaaatcagtcacagctgtgtgatcctgctgaacgagcttcaaaatgctctggagaaatataaactcgttgaatacagtggcacatcaattcacaaaaaagctagaggtatttggaagaggattgtctgggagccggaggacataagtgagctccgaggtcgcctaatgtctaatgtgatattgctccagtcatttttgagtgctatatcaaggtatcatatatacttctccccttctgccccacctgccgcacctaagcatgaccaacatctgaaatccatagtcaaacgatggccgcgacaaagcaaacactggaacagctcaactaccgacaagaaggcaatgaaaagtcttgcattctcgactggctgtctgccgtggattacacgttacagcagcgtgatcttctcggtcgacgacaagcgggaactgggaaatggcttctcgattcgaaagaatataaactttggcttcgaacacgccgaggcaccttgttttgtccaggaatgccgggtgcgggaaagaccatctgttctgctatccttgtggatgatttgactacacgctttgaggaccggcccgatgtcggtatagcctacatttattgcaactttaaccgacgagatgaacaaaaagccgaagacttgctttcaaacctgttgaaacagttgagccagcagaggacaccccttccggatgctgtgaaagacctctacaagcgctgcaagactacatcgactcatcctcgattcgatgcaatatcgaacgctcttcactccgttgtctccacgtattccgatgtgttcatcgtcatcgatgccctcgacgagtgcgaaaaaatttgccgtacgaagattttggacgagcttacaaaatttcgtgccggggccggagcaaatgtcttcgccacgtcaaggcctacggatatcgatgatttgttcaaggggggtggctttctcgagatccgtgctcacgaagacgatgttagacgttatcttgatggtaatatgttccgactcccgggatttgttagtcgaaatactacactgcaagacgagattatgactgtaatctcaggccatgtacagggaatgtgagtctactttataaaattgattctccgcccaagacttagattgctcatctatcctcaggtttctccttgcacagctttattttgaatcattgatcggcagaaggtccgctaagtctactcgaaccgctctgaaggagctttcggatgggtctcatgactttgcgtacgacaaggcttatgacaacgcgatgggccgcattcaagggcaactgggagagcaaactgacttagcgatgcaaactctatcttggctcacatgtgcgagaaggcccctcacttcattggaactccagcatgcacttgcaatagaagaaggagaatctagtcttgatgaggagaacattccagatatcgaagacatccttgccgtttgtgctggtcttgtcaccgttgaaaatgaaagcgggataattcgactggttcattacacgacgcaagaatacctccagcggaagaaatatatgctcttccccaacgccgaaaacaatatcagcacgttgtgtgtcacttacatctcattgaacacatttggatctggagtttgtgaaagcgatgcagcgatggaagagcgcttacaatcatatccgttctactcttatgcggtatgctattggggaaaccatgtgatagcagtcaaagatctgcatccagacgtgctagagtttctgaaagatcagccaaaagttgaagcttcagaacaagcactcacagtgactgaggatccaatccagaaagattggagccaaaaatattcaagaaccatgactgggctgcacctcgccgcacattttgggattcaaggagcagtagcctactttcttgaacatggttgccctgtggacatctgttataacggcggttggtcagccttgaaacgagccatttcaggagatcatttgagcgtcgcccagttccttctttctcatggagcagatccaaacgaatccggtccggacaacttgaccccgcttttacttgctacccagtatggtcaagaagccattgtcagacttcttcttgaatggggtgccgacgtgaactccccgtgtagatggtatggaagtgcactggtcgcagcatgtgacgagggccaactgaaaattgcagagatattcctcaacagcaaggcagatatcgatgtggatagcgagctgtacgggagtcctttagaagctgccgcttcggcgggccactggggactagtgaatttcctgcttgaaaggggcgctgagcctaattccaagggttctgatgttgacaccgctttgcaatcagcagcaatccagggccgaggagatattgtgcagatattgctcaaccatcaggcagatgtcaatcgacaagcagggccgcatggaaacgcactgatagcggcttcaatgaacgggaatcagcaaatagtgcaaatgctcctcgacagcggtgccagcataaacacggaacatgagcttggcacagccctgattgctgctgtcgcaaaagggcaatgtcacatagcaaagatgttactcgacaacggtgctgacgttaatggtcgcggcagactacatggcactgccttgcatgcagccgccgcgttcggaaatagtgaaatagtgcaaatgcttcttgatagaggcgctgacagcaccattcgtgcgggtgtttacaaaacaccccttcgagcagccatgacgagaggtcatcatgaggccgccacgcttctcaaaagacaggggcagcagttgagggtctgaactttgagtatgcatttgcatggaatacattatagatggatttaaggtatagcagaattcacggtacttggtgttatttttctcttgtttgttgttcggtagtggtgattctcctcctctgatggcaaagcaaagtgtgtggatagtcaagggccgactgaactttacattctgcgatctcctgagaggacccgatgccactcacttgtcagagaccctgaggttgtctctgatacagcaacccctattttttccactataaatggagcactagtattatctgatcgctaactatataactcgaggcaatgaaaagttcacgatcccgtctccaggttatgaaaaaagagaagtcaagcattcactatgacatcattttataagcaaaacctccaatataagttagccactcattgtttatttcacgcccttcgttcaagtgtcaacatggtacctcggcgccacatagccagtactactggtgtcaatccacagctaatatgtcttctatgtggaatgaaactcccatacacgggtaattctaggattgcaaatacaggcgaacgtgatcaaatactcaaacagcaatagaaaaagatttggagagcataacatgtgatggtaccatctcgcgaggtagaaaagtcagacttcggcaattttcccacggatatggtcatgcttgtgtcgagtcagtaaggtctcaagggacttccaatcaaatcttcccagattctctaactaggacagtaatcaaggagtctgataccaaataccgtcttacgggcattaatatactcaaccattctgcagaaagcccttactacaccccaaatgatccagaaatggcaagaatcggtggaaggaaaggtacagccccggatcaagtcggcaatgaagatttcactgaattctatggtacaagcatcggaaggcagcccagtcaatacaaagggaaagtggttggatatatcatccatgccagttgctgggtgctcttcaaccaagtcgaagggctcaaactgaaggaggctaaactcgcgaaactcgtccaagtctgtcggaaacattggcgcaagaacacaatgtggaggttatatgacaacaacgtgcgttttgtacaaccgctccaggacctattgcagtatgaatacggctgcgatatctatcaaaatccactagtgcccaaatttcaacaagccttggattgcgcagatgtcgaaagcttagaatatcttcccggtccagcaacattccattggaagttgccattctgattgccgagtgggtctgtcctattaagcataccttgagtgatataaaaaacacggggaatatgcttttggtgtttgggtggaatttgcctgattggttttggcaaagacgattggacgaaggattgttcattgaattggataaacttaagaaggagatgtctccagtcggttggcaattgcggctgaatttgatgtgtcttgttgtgggtagaactgagttcaggtccagtagtggtctagcaagtcgtgaacgggtgttgaagagtattcttgctcttgaaaaaccctacttaactctagaatcagccaaggagaaagcgctgatcgagaaggggaagaagaatgaaagtcaatgattgctttgcttgctaagttattcctagtcgtcaattaaagatgtccaagtgaacaatttgcccttttccccatcgctcgagggagatagaagtagaaaaaagcaaaggcacatcctatagcaccttaatttacatgtaagacgagggaggtgggtaaaccatgagactgcaaaacttgtgaacaggatatgatacaagattatgaccgctatgaccaacacgtaatcactcataaaatacaataaatcgaaagcacacatcacaccagactagccacgcttgacctcttgctcgagcttgtccaaagccttggcgtatttgggcttgagtgagtccagtgcgtcggccttgatctggacacgatcgatgttcgaggtacgcgtgatccggccgtccacactggctgcgatctcgttggcaaaccagcggccctcgcggtgagcaaccagggtccacgcagatcctggccggccagcgcgggcagtacgtccaactcggtggacgtatgtagtgatgctggtcgggatatcgtaattgatgacatgagtcaaagattccaggtcaagaccacgagaggcacgatcagtagccacaatcaccgagatgcggccttgtcggtaagccgtcaatgtcttgcgagatgcagaggatttgttagatttaatgatagttcccacacgcttggccaatgcgggatgcagaagcgaaatgagacgtgcaagtcgggaggcagactcagatgatttggtgaaaatcagaacagtcttacgtgcgggtgagggaacgagttccatagcatcggattccgagtcagatgagtccgaagaatcagaagaatcagactccgagtccgagtctgacccagaagatgaagtatcgtcatcagatgatctgtcagagctagtatcatcatcagagctggtatcatcatcagaactggtatcatcatctgaactagagctgtcagagtcggatgaatcagacacgcttggagctcggcccccaccaatctcgatgtgagaaagaagaagacgtaacagataaagaggtttgagagatccatcgccaacttgaacaatgtactcagacaaagttgggggtagggcgaagtgagaatctgcatgaatagcagacgggtcatgttcgtctgcagcattctcggacccgatgataatcatcttggggttagcgagacgcagcgagttgagtttagaaatatctcgggtcattgttgcactcagaatcacctttcgaggaggcttggcgtcaattgaaagcccaagttcagacaaaagcttcccaccaggcccaaaggtctcgggagcctctcgactattcagcgagttcatgacaacatcaacccactcttggaagctctcattcaggagacgatctgcttcatcaatcaccagccattcgagatgcttgagggtgaatcctttggtatagcgaatgtggtcaaccagacgacccggggtacagataagaatgtcgacattcggctcggactgctggatgtaacccggaagagacgcatcagagtcaatcgcctcactgacacaatcttccaggctcaagttcatccagtcgtttcctttcaatccgtcacgctgttgctgttggagagccgggttgtaaacctggtccacgcgcatcaagagtttctgttcctctttgatggctacattaccgactgcgcttccgatatgaagtctagatccagaagcacatagttcgcaggattcgcgagcttgtttcaccaactcccgtgtagggactacaatcaatcctcgaagtctggaggcaggtctcggcgacagagcggtaacaagggggagaacataggagagtgtttttccagatccagtcgccgcagagatgcaaagatctcccgggtggttttgctctccttgtagaagaaggggaatgacggtagattgcacagcaaaggcttgtttgtagttctgttgttcgaggattttgagaaggtctggctttattccgagctcggaaaatttctttgtatcctgagctgatttgcgcaacggatttgccagccaagcgggtagagatgaatatgttgggatctgctcgggctcgggcgggttttcaggttgaggtagttgttcaagaccctgtgcgtaaacagcttcgacagtaggtgtctcatctacaacggcttcgggttcaaattttttggctttagcgctggaaacacttttggtgcgctcgaactttgacataatccccgagtgcttgttcttcgatttaggttgttcggcttccggtgcttcaacttcttcatcttcatttcctgtagtcacagacgcagctgcatccttcaatgtgtcgtccgttccagagcttttccgcttgctctttttcgatttctctgccgtttcgctggtgccgttgcgcgggtttccaacagtcgcttttgtgcggtctgagagagtagtatctttccggggcgtttccggggagttcgatccttgaagcgcatccttgagatgcttgcgcttcttgatactgccatcatctgtgacctctgcgatcggcaagccttcgcgtttcttgtgtttcttcgttggcgtgggagtggttgcaggctgagagccatgggcatctctcttgcgcttgtgagactgagtagattgaggagtcgcatcaaaattattagaggactcgagtcccgaatttttgccggccattctctcgtaattctgccaatgtcggggttgcgctggatacctcgtggggatcaaattccttttctgaatcttttatgccggcagaagacataataatatcaccgccctagctaccgcccttcttatcgggacagcttccagatgtctccagatgtctccaggtctcctgtatttattggctttcatggactggtgttttgagcagcagatctgttagccatggaaaggaatttgaaaagaagagcaaattcgatacctcggagttctcgttctcaccctgagaaccacagccacgatgccgtataacatcgcgtgagtatttgttctatctactagtcgcaatcacttgctaacattgatatggttatagaatggtcagtgacttcttttttccccagtcaggtaagcctcttcttttacgtgtagtttatacaatcgctgacttttctaggtggaattgagagtcacatataccaattgtcatctgtaagcacgctaccttgccgctctacctgcgctctctaattgctcctcagaaactcattgatcgaggacacaaagtcatcgttattacccatgcatacaaaggacgcaccggagtccgctacctcaccaatggactgaagatttaccacgtcccattcttcgtcatctatcgcgaaacgacattcccaacagtcttctccttcttccccatattccgcaatatcgtcatccgagaggagattgacatagttcacggccatgccagtttgagtagcttctgtggagaagctattctccatgcgcgtactatgggactgcggactgtcttcacagaccattctctcttcggatttgctgacgcagcatccatcctcaccaacaaattactcaagtttacattgagtgatgttgatcatgcgatttgcgttagtcatacttggtaagtctcccgccaacgccctggatgactcaactgacaagtttcagcaaggaaaacacagtccttcgggcttcgttggatccattaatggtgtcagtcattccaaacgcggttgtggcggagaatttctgtcctctatctcatactactcgtgcacctgatcagggcctgagctcccccgccgatgctccaatgtccccgagacaaatcgggcccgatgatccgattacaatcgtggtcatctcccgacttttttacaataagggcactgatcttctcatcgcatctattccgcggattcttgcctccaatcccaacactcgcttcattatcgcaggatcaggacctaaagcgatcgacctagagcagatgctggaacgcaatgtgcttcaggataaagtcgaacttttaggttcggtccgacacgaggaggtccgagacgtgatggtgcgaggtgatatttatctccatcctagtctgacagaggcattcgggacagtcattgttgaagctgctagttgtggtctttacgtggtctgtacccgtgttggaggcattccagaagttttaccccagcatatgacaacgttcgccaaaccggaggaggatgatattgtgcttgcaaccagcaaggcaattgcggctttgcgttcgaacaaagtgcggacggaccgatttcatgatcaagtgaagatgatgtattcatggcgagacgtagccgcccggactgagcgcgtgtacgagggcattactggcgatattagtccagaagaattctatggttactatccaggtcagggctgggaagcgagcggagatcgcgtccgcagctttgcgctaattgaccggctgaaacgttactacggctgtggcgtttgggcaggcaagctcttctgcctgtgtgtcgtgattgacttcttgatctatgtcttccttgagatgtggtttccccgagccaacattgatatcgcacgaagctggccaaagaagcagccagcgagcaaaactgagagcaccagaagtggtcgctgagaattcgcactccacccaatccttagcgcagaaaggaccggcctgtcaatatctttttggtcgactctcggttctccgcctgtcctgtttgtctcggacagctcataacctcatttaatcacccctcttcacgtcctctcgtgttgcacgacccattttacacattctcatccataatacctcatacataatgtctacttggcaaaataaaatgcctgaaatccttcctgcggtggtgccacctgcctagatggctggtggctgatagttgaccaaacttcacatcgaatagactccattggtatattagcaagaaaatgtaataatcaagaaccaacgccattatgcacctgcgtttgacatcatgtacgagaatgatcggctgccccaactttgaatcaacgcatcaccggaggcctgccctctttattccacttgacgcggctttgtacccactccacagccgcctggacaccagatccaagtagcgcgctgaccggcagcacacgactgtcacggacgccacttcctgtttctccctcaaacaccttccggacaagcccttctttaatgcgaaccacctccacgcagtcctcacggtcctgcttatttgccaacaccaagataggaacaccagccacatccgcattttgtaagactgactcgaggacttggcgacattcgtctaatcgcccgaactcactgctggccgcgttgattccgacattttgctccgagaaggcctcggcacttgcgctccctcgtgtgccattgcgtgcaggacctgccacggagcttgcgcgccgagtaagtcgcgcgatatcgggatcttgaccaacgtcggaactatcgaccacgaagatgatcgcgtggcagctagtatagtagctctgccacagaccgcgcatagagatctgacctccaacatcccaaatctttaaattcatgtccggtaacgctatcgttgcgacattctgcccgacagtcgggacggtttttccggggttgggtactggggcgccatcggagcggggttggtacagtgctttgatctgggagaggagtgttgttttgccggcattatccagtccaagcagaatgacagaatactctaagtaggttaggataatcagcgtagaaggtcatgcgataggagagagcagttaccttctttgctcgtggcggctaagtacagcgacttggccaggtgatacatgatcgcgttccctatggggagctcaaggccaagcgcaattgcaattatagaaaaacgggaccggaaacagaaatcatgacatcgcagtcagttttctgacgttgaagcgctcttcccccggaggggcccgcgttgcagcctcatccatttcggggagttagggcttagggctgaatgtgatctggggatgttccagtccgaactacatcgggcatttcaatgtacctcacagcggtaaaacagcgtgcattcaacactttcaacatttccaacgttcaaatatgttcaattccataacttcaagaaatatgacgctataatgatggacgccacacttccccggcatactcctcgggtccaggttcccaactcagtctgtcttccaaggtggcaaatggaaaaccgtcgactttcccgagtctcctcttctccccacttgcaaacactccgctttccagggtttgtcagcttttaattgatcggcggacctgacgataggaagccaatttgtcagggacgttgacctttccctcctgaattccctgggatacaaatgtcacattcctctatggccttgctgtcgatccctggtgagaaggcagtgtgacgaggatctcaccctgctttgattggatgatctaccctttttttttaccctatcgcatgtctataccagtatgccacacgctccatcattttcttgatatacatcgctgtcaatggagattgacactatcatcgtcggtatgtctatcgtagttgatgaatcattttgaggccattcgagacttttcctctgcttgagccccacaccccaccccgcgctgctaggagtccttgcgaaatggtaactgattgaaccgattttaccaggcaatgggccgtcggccatgatcctttcatacatcctccatggacatatccctttctactcatccgatcctccacatcccgatcatttgttggacgccaagttgaaagctgcgccagatattttgaatgccgatgtgaatgctcttacagcacattttggcgcctcgcgcctatcgtactcgacccaggcgcttcccgtgaatgttttgctagacacacttgtacggccaagtgttgatgtagatgagcccggctgcatctcaaatattgattggcgctcacagcctgagaaggctgtctcacatcttgtttttggaaagtccttgaagcctggaggccaatggaccgaagatccatggggcgcgagttgggatatccagacgttgagttatgcggcaatgctgtccttgcccgggtactcctttgccgcccatcacaaaaagaccacaggcaaagatttaccatcatatacaaggcccacgcgccgcgagattgcggattattttgccgcttatccggaggctgcgcatatcgatgatgcttttcggtgtggcgaagaattgaaaggcatttcccgcaccgctactggattttatgttcattctcataacatccactgcaagcgtctggtcctggcaagtgggatcttttccgaaatcctctcaccagagccggtcttacgtccattacttgagaccaagtcctcgcctaatgtcccgctagtcgttgttggatctggcttctccgctgcggattctatcatctccgcctcccctgaccaaaagattctgcacatatacaaatggtcgcccaatgaccgcccatctcctctccgggcctgccatcagcaagcatatccagagtatgctggtgtttaccgtcttatgaaacgagctgccctcacagccgaagctgctggtaaaggccagcggccaaagtaccgacgcgcgacttcaacgccattccttgaaagccggaattgggaagacctctatgaaggtctccctaatgttgaagtgacgaacgtgaaagtccacggcgacctggcgacggtcacattccgccagcaagatggaactgtcttctctcggaccgtggccggcctcgtgtatgctgcaggccggcggggcacgctagattaccttgaccccgagctccgctgtgaagtgttagggcagggcaatcaagagaatccagtagtcaccggtcagaccctccgtgcgaaagcaatcgaggacctcgaggtcgcaccgggagtttacatcatcggcagcctgactggagattctctggtcagattctcatacggcgggtgcgtgtacactgctgggcatttgatagacggcgagcgggacagtcgcagtgtctgtagtagtctcacgctatctgctaaactacatggttcttcgctttccgtgatgaacggcatggacggacaccatgtctacccgaatgacaacacattggacctggctcgcgaagataccttcagcaaaatgtcaaccgtcacgaaccagtctgttgtacgtggttggtggaagacactctcccgcatgtggagtcatctcacacgatgaggatttcgaaatacgttgcatgtacaccacgatccccaaatgtaaaattctagacacgccaagaaaggcatatatattgtttatctatcttgtttctaaaggattttgttccctgcgtgctcctccaaactacaatgaaacctacaaaatcccaaatccaagatgcagtagaacatcaaatgaaactaccgaagtgatattgacattcctggttagacaagagaggtaagcagtactagcgatcacctaaatttcggtccatcctccttgatcatatcagccgctttctccgcaatagcatacacagtagaaatgatgttcccactgatctgcgacggaaaaacgctcgcatcgaccacccgcagtccttccaccgatttcacccgcagtctattatcaaccacaggacccattgcgcacgtccccaaaatatgattgaagggcataatccgctcacgggcaaactgctgagcctcagcagggacctgcaagttcacagccggcggcggatcaacacgtcccagcacactgccagccacatccttggacgagaacaccttgtccacgaaagccaagccagctgccaagacatcaacatcggcctggtgcgtgagtatgcctagatcgatatcagggggtccttggagggatccccttggtgatatatgcgtactgccgcgcgaagcgggatacatggcactgatcaacatggtgtagcatgcattgcgacctttcggtgctcccggcagcagcaggccttggttagaatggccgctggcgagattgaaatggccgggaatgccgtagtattggatcgttgcgaagtcggcatctcgtaggctggatacgatgtgcttgcgatagctttctcggaatttgtccccctcctctggggcttccacggcggcgactgtggcctcgattgccgtcttgggacttgggatgcgtagggaaggaaccctgtcaggcccatgcagcctgcgaggagtccgttttgggtgtctgccaacagcttggtttgttgctgaagaagattatggtctagaaacaaggaatccatggtcacaatatccggcacgagttcgtatacggcggatgtcatggggtgttcttgtaggttttcccccacggcgggcaggtcgacgattggatcgatgccggcagattgaagaatggctcggtttccaattccagagagctcaaggattcgaggactttggatagtgctcgctgacaggatgatctcttggcttgctttgaccttgtgctgctcgcctccgtgccaaaactccactgcgcttgcccttgttgcctcaccaatgtggtcgaaaataatccgactgacagatgcttcggtcaggattttcaagtttggacgttcgagggcagggatcagatacgcagaagcagaatagctgcggcgcacttgcccgccgctgcggtcaatgtttgacaggctttcaaaagcgcctatatgttggccaccgtaaggatcgtcggatcttggaatccctgaagtgttttcgaggcctgtgaaaatagattgctcgaatggaattggcgagggtggcatagagagtcgaataggtccctcttgcccatgagaagctgaagacaggtgtactaaattttttgtactattcagtgggtgttggaggtcttcgtgcttcaggtagtagggctctaagtcgttccatgaccatccggcattctcttcaccccacgaatcgatatcagaggccgatggacgaacgtaggccatgaagttgacggcacttgagcctccaagcaacttgccacgggggagatgatgaatttcgtccttgttccccgcctggtttggttcaagggatatgtcagctcatgtacttatttcaaattgattaggcttcccgggcatggaagggttatcgtaacaacgccaacatacttgcggtattgtcttgaacttccaatcatactcttcgttatgcaacatggccgatatgccagtcggggagagtacattgttgtcgtccagcttggcttttccagcctcaatcaccccgacaacgacattcggattctcgctcaaccgattagcaaggacaagtccagcagtaccaccgccaataatgagataatcgaattccgtggctaagaattcgctacaagtgggaaatgagtaatcagccttcatgatgagcagcagaatgtatgttgtcgttgaaagtatatacacaatgagatctgcagaggaaatggcaagctatttatgctgatactaagtcagagtcgtgtcgtcatatctacaaggccagagctgtcagattataaaccccgtactccgtactccgtacatgcctcttatactccgtggacgcctgaatgcggaattagtatccgggctgtcagaagtggagcttagggtttcgaccacgacgatggtccggtaacatacaccgccttacagggtcttacagacagtgtatttttgaaacttgtatccgtacctgcagagtcctgcagggtcccgaccgagaaagcttagccaatcatcgtacaagcacgtggttgtcatcagaaatacgaaaacgaaagttaatgatcgggatttgtaagagagtggggatctgacggggtctgacttgttctaagaccatcagataaaaaaaggactccacttccctgcatgtccgacttttctttccgtagacctattaaggacatttgtttcaccgggcaaatttggcataactgctatatccttggttttttatatattctcggggaataaggaggtcgaagcacaaagcacttctatgattccggcttcctgggaggtaccgaggtacaatggactaaatctcaccgcggccatccagttgctattccggccttaaaagtggagaaaattgcttgattggctgattcttggcattatggacagtgacatcgatcttatctcacccctcaacatcagttcgcaccgatctttgcttaattaagtaaaaggacagtccattacggccgaaacctttcattaggtctagttcatagatgattatgccagatgcacagatatctactttcatcctgctaaatccgaacatcgtggccaccgggcaaccttggaaagcatcagcgtttctaattaaattgcctatcctagcttacggcggtgtgacagtctgataaaaatagtagttagttatatagtccgaaaaatgtgtgactaagtaagactaagaaatttactgtggggaacaaagccacatgtaaatgagggtgctttttgcaaaatagacaagttacttggttatccatctaacccaccccaacgaggtacggagttagagccgaatatagattaatcagaccattcggtaaagtcgggacttcagcctatctcgtccttctcaacttatataaagccaggtacaagcccgcattggcatgaatcttaaaaacaagccactgttcaactatccaaccatccaaccacccaaccatccatcatgcgtctcaccgtccttctctacgctgctcttgccggcctgtcgctggccgctccagccgaacccgccgaagccgccgatgctgctgccttggacaagcgtcaggcgagctgcgtgaccatcaggaaccaactcgcttcctgtgaggctgaaggcaactgtggcactgtcatggcccagtgcatcgctcttcactgccaggtgagtttgaatttaaacgttacgaattgtgcccacatggataactaactcgaaaatagcactgcgccaacttctagttggggtcaattcctacttctcttccaaccgaggtcgatgttgataaggtataagcccgtctagaagaggtagtccctcgcattcgctgatgattcgtctggcagctcctgcgggtgtaatgcccttctcggaaagctggacatatagagaaaatgggggataaaggccgaggccgatttaggcttgtctaggtctctgcaaatgtttgatttttggtccatagggctttccgatatcttcattcaaatgcagtgactttttacctccgctaattatacgcgctgtttccaagtatcagaatcaagcttgtagagattcatatatagtttgtcccactgataataaataggagtgcgccattgggatatccctagatcgagaacgatggagtagcctcaagtagaactgtttagctgaatacatgtcgtagtatttgcactgattaactttgcactagggtggtatgtatgaattgttacgtgcgggggtcttcaggaaaaatagtgcattctaactagaatattgaacatgaggggggaaggaaaggaaaagaacagggatcggggccattgtaggcttttgtgcccttgccctgcaactggcttatggatcaggaaggaacgactcccacaggaaaggaaggaaccaacgagccttgatcgaaatatatatcaaccctccgaacctccagttttattgtaatcagcctcgaagcgttcgcaagtctgaacaaatgacgtatcctgctttctccatatgacccaaagccttccaggaagacaacattatttaaggaagtggatttcttgaatcacgactcatggtggcattagtttactcatttttgcggcaagggtagggctttcgatggcccacatatatatatagtgctagtctcaagtaggaaaggcgggtgatgttccgcatggaacccgggaagcttagatatgcttattcgtatttgctgttggtcattgctcctttctcttattggggcattgggtattgtggcttggctctgatttgaaaatgatgttcagcagggcttttttatcaggttagaattactgatctcgtgaaatcaatggaccggagcgtaatccttgtatctgaatcaacaaccagaaccatcttcacgtgataagactagctacacttcctacgatagtagccaatgacaccgagtgtggtacaatctgttggatcatattaagttctcttgttgagacaactgccagcattgcattcacgaaatcaggtagaaatgttctgccagtatcggcacaaatccttagtgattcgcacgaatgtagtctaggatttgctggaacaaaacatcgtcgtccaccaagtgatagatattgccactaggatagccaggtagcccccaattgagaacacattcgttctcatcgtcgtacttgaacactctcatcaattttccgatggcgacaaagctgtaaactgggcggcggagccagattggacgtttgccgtgtgtgtcgctcaggtattgagtcaattggttcaccccttcctcccaacccgatggccgggcctgtaggctctgtctcttgcattggacaacaagaaagttcgtgggaattgttttaaaatccatataatgatacgtatggaataagagttcattttcgccatggaagcgggtcacgtagccggcagagcagggaaattggagggcaagaatagagttccaaactccatagattgttgcatcggggtcgtttcgtttggtacgatcgatctcttcgtagatggcacggatggttaagtgctaatactagttagcagcttgcgagtaaccatgttgataatacttgacttaccgtttctgccatgggaggcaacaacctagcaaacaaccttgtaacaaaggaaagaagcaagcatatgtcagcgatcataaagtcatatgatagacaatcatgcagatggttacaatagtaactaatttgtttgagagaaagcgaggattttcgattagagggatattcgccggcttgttaataaaatccctagcctattgtgtcgtctcatttagactcccgaggccagtcgtcatagacatgctacctaatcaccaccgaaaagaccatagagacttaacataattagcgcctacatcgcctttcatgccttactcattgagactccgcccgtcttttgcccgccgttagacgcgggcctaaactaggccgctacactcattttactctccttgttcttcttgtttcccagctgcttgctatctagagtcctttcgcatttactggtcgatgccaatcgccctctcgtggataattgcttcttcctcttttccgtcatcgccaatgtcggcccccgtggcgccagtcactccctagccgtagcttaccgccaggacagcgacagcgacatctcaccgtgacctctagcacgcggagagcatgtcgtggcagatactctcgcgctgatcgaaatctcctcggacctcgcgaactgcgcaccgcttgggcggagacggggctctcggagggctggtatcgtcggtctcagcgggcaacgaggtagagagtagtgagcggccaagcttcccaattgactaaattttgcgcagcccttaattattagagcccggagattatcccccgtgctctaatccttgacatggacctcatatcaatgccacttactgcacctccctcgtgggggtataaaacagtcaaggttcgagagcctatcatccgcaccgtgtggcgatagttatgatgtgaaccgcagtctttctgtaagtgttgtttagatcaatgctcgctctgcgcgacacctaatgcatgaagtgcatcccgaagttatgaagccacttgaaaattcctcattgtggggcaccggcctccatcaacagcgaattattgccgatggtcttttcgtcaaggtgaagttcggcgggatcctgtataagtataagcagattatcgatgttgtccatgtgcgcagttcgtggtgcctgtgtgacggggtcaagcgcgaggctgttgtggtcgaggcatcgggtggtaagtggtaagcatccaatttgtgcagatttgtgaacaaacccaaaccctctggtcaagtcaattgttccgagcctcgatgttcaatcatgttttggcaccgtccatttgcttagcccatcggtctgtaaaagagtgatcgctgcatgttattacctttagagaacccctattagtcaagcgggatcaactcggcgcctccaaacatactcgtatcatctgtcctggggcgaatagggtttctgagtgcataattggtctgagatagtgcgttcgtatactttttcctagctcggagctccatttgtggagaaaaacgtatgttcaacacggccgctaatcccactgcggccagcgcggtgatcaagggggaattccgagtgttcatccaaggcagcggatagggcatggggccccgtagggatcaccggacatggagttcacgaagatatgaccctttgctaatttctggactgggtaaaccagactgtttattggcggggtgacgttttgagcgttgttagtggggggtgctagtgttgctagtggcgactatgcgcgttttgcgtggctgctgaaacttgtttgatcctgcaaaaattagtacaatggcattatggatctcgataccctggacaatccacttgagcccgcatacattggatacgatggtgatccttcatcgcactggtggggcaatttagtgaatggtttcttttctggcgtgggcattcattctttcaagcgacgttgcgacagcgggatagttggctttccacattaagccatctatttaactagtggtgatcttgattgcgtaggtgctaaaagaagaagtcgatacgttcacacgttgagattgagatgaaacagaaaaccaatgttgagcacctcgtcaggatccaggctgtcagagcttattattatcctccaatagaaaccacaataatacgccaaccgtttaagccttggagaaaggtaaaggctcgaatatgaggactagtcaccccttatccaatgcgatcagcagctaaccctatttcctattagggctgcatatacaatccctgtctctatatgctaggccaactactatatacttcaaattaactatgatctacgacgtactgtcccatggcttactttatcctagttatactcaaattaaaaatgaaacggttttctcatttccccccttttccccactgttattagcccactcgtttaatgtgaaatatggccccatacatactaacggaaaccggttggtcccaacggtcttcccccttcagttgccggtcgaaatgccttagacgccatttcgtactcatttcccagtgtagatctctattccgaatgtcttccgacataattactcccgataatcgggtagaggaccgtttcttccttatataacatctctcctcgtcctacgaatctctgatccatactttcctacacctcatttctaactaataatccctcacttcattctattccctgaaacatggctgaatccaccacccttatcttcgttcccggcgcgtggcacggccctgactactacgatcccgttgtggaacgcctggaagcagtcaactacaaaaccgacaaagttcacttgccctccgttggcccatccgagtatctcttgaacttcgatgcggacgttgcgcaaattcgctcccggatcgaacgagcagtggatgccggccaaaaggtcgtcttgatagttcactcttacggtggcttgcccggaagcgaggcaatcaaaggcctagacatcaagacacgcgagaagaacggtcttcccggaggcgtcacgcatctcttctactgttcctctttcatcatcaaggaaggagattcgctgattggtgcctttggtggaagtgacctcccgtggtttgttgtcagcgacgacaagttgcaagtcaatcctgccgatcccgtgggaacattctacaacgaccttactcccgcccagattgagacttgtcttgccgacatcaagcctcacagttatcagaccatgcacagcccttgcacctatgccgcgtggagagatgtgccaagtacttacatgtactgtcttcaggatgctgctattcccattgagattcaaaagggaatggtcgaaggaacagccggtggatatgacattaagacagagacagtggacgcatctcacagcccattcctcagcaagcctgatgaagttactgcggcgattcgtcgggctgctggggaggttgtttgattttttggatgagtttacaatgtgttgtgattcaatgttttgatatgagtgaatagcattagatatcagtgatgaatttacttggatgatcgaattaacataagaatatttggtatatacatgaatatcgtggaactaccccgtaaaatatataaggatgcccattaaaatcatatacctcacactatctaaaaaaatagatagctgaataattgatggatgttcttcttgagctccaaagttgtaccccgggcagcaattcggtggcaagtgaatcatggttacatcaccagccctaagaggtctatatagtccggggtgatttgcttatcaacttattattatagtgatttaattcttttttagcctaatattaagaacgtagagaggcggaatataaaaattccaaggtggcattgactagagctatccttctcatctcgactttctttccaactatcaaaagatgtggccagccgatgacccaatctcagcctatggctttacagccgttttatcatcagctactactcttctcgcaacagatcctccagtaacaccagccccatcgattgcagtgaccgaagtcccgattccagcaacgtccctcgtccagcgaatcaatgaatatgcaaaatctcatcttcctgagccgacatacaaccattcccttcgcgtttatcactttgggcttgcgattaagcggtacagattccccaaatggacctttaccgatgaaacatacttccttgcctgcctgcttcacgatatcggaacaaccggacctaacttagaggtcactaaattgagctttgagaccttcggaggcctgaaagcactggaagttctgcagaacctacagccttcctttgcaggaagcccggtcgcagtcgccccgaaagatcaggcagagagcgtggtggaagcaatcatccggcatcaagacttgtgcgagaaaggtaaaatcacagctctcggtcaactgcttcagctggcaacaatcttcggtatgttgaccctctatcagagttgattgttttggcataacatattattccttgaacagcgaccaaaatggcgtagcgctatttactggccccaacaagtgtacaaatgttggctctaacttgctggaaaacagacaacactggctcttatgccaatctcgttcatccctcgactatccgagatgtttccacccatttccctcgtctgaaatggagtgggtgcttcgctagtaccgttcatgaagagaatcggcttaagccctgggcacacacaactacacttggcgaagacgaattccccagtaaggtgctaggaaatactctgatggcaccctatgaatgatggcatctcgaggatttccaaagaatatctggcatggagctcataaaccttttagacgctaacaataaaagttgacaaccgagcttgcattcttccgatgacctatattttcacaaacatatattaggcttcaagaaatataagtatatcttaaattcatacatcaggaatcgtattattgcggagcgaagcggagcaataataaatcacgaggtcttaggtgtatgtcatgtgaccaagatacgtctgaatatcccatcatgtgaccaggtaaatgagctagtgctggctagctcgttctttatgcaccaatcaaaatgcatttattctatcattatggctttcaaaacatgcactagacgcggtcactcgcgtcctttggagctatttcgctcgcgcgctagcaatcgagagaccgatcagtatcaatcttgtcgagatgccaaaaagagagagcgttctaaacgccgtgcggctaccgagcaggcgttggcctattacatcgtccccggatccctacatggccttggaaatttgaatcagtcacttcgctccgcaatgactatctggaagcttaaggccaccgagatcccaggggcttatacattggttattgcgatggacccaaaaatctgccgtaagctggtcactgaatggtctcatttactcctctcactcccagactgccagttcactcctagttcattcccacttcactcccacttctgctcaccccaactcacctcctcagctgactctcaataagcgacactcgcattcaatctcaccacgatcaactatggagtcatctcataggaagggagagtgcaggcgtccaggggtccacaacggagaagagcccagattgttgctggaagcctgcaagtcgcccgcctggaagaggcctaaaatggccaacagtggtcctgaaagcagaatggtctgaaccattgactaaattgaaacaagatgttttattctgcctgaacgagtcaaaccaagaggccaaattctcattgactaagagtcgctcggaggggaggaagactatcaccattgaaaagtggacagctgacagggattctgtcaagcccatccaagccatatgtatcaccccaattcgaggtcccaattcgagcggccatcagatctcagggtcattgaaaattccatttctggactgttttcttcgcgcaaagaggaacgctgagatgcattttactctatcgcacgatacatgctggacattggagaagcattctaaccctacaacatcttccaggaagataaaagatcgtgctgaaattgtcaagatctgtaccagttggatcgataagcgggggataccatggatactgctgatcccaatggtggcgggggtcagacttcggtccatcagataccaacccaacaaaagcacagatggagaggttacgaaagctctcctaccaggtgtaggggcctcacccctgcctactgctactcacaatttcctcttaccattccttcttcgtctcctgtcccataataataatagtaaacgaggcgtagtccagggagatgaattgatctgcccgcttgcattcatctctaggaactgaaaagcacaataaaatgagcaagttactatacttcaaccccaaagtagcgaaattgtccagtcggtgtagagatagatatctccccgaactcggacaacacaccttcatgaatcctccacagaagccaaacatgcttcgagccatcctcgccacgttattcctcctcgtgccattttattacatatacaaacctccaagtctactcattcgttactgtcaacggcgctggccggatgtacttttccgcgtagacacagacaaaaaagtggttgcgttaacgattgacgatgcgccctccatacacacacctgcaatcctccgtctattggaatcgtacaatgcagctgcgactttcttcgtgataggatctcagatcccaggacacgaatctgtcttggctgacctcgtccgggctggcaacgaactcgccaaccatgccatgtatgatgagccatcgcgtgcactcagcgatgacgtcttggcagatcagatgcggacagtccatgctggaatccaggaagcctatgtcgcggctggaaagacagaacctgagaattggctctttcggcctggctcgggggttttcagctcccggatgcgaacgcttgtaaaggagctgggatatcggctggtgcttggcgatgtgtatccgcatgatccgcaggtgccattttggaaactgaacgcgagccatattttgagtatggttaagccaggcagtattattgtctgccacgatcgcagggagtggacggtgcctatgttacagaaggtgttgccggagctggaccgcagagggtaccgcgttgtcacagtctctgggttattgaaagagattggcgtaaattgatgttcaagttgatggcgaatgaatattgcgggctatcaatttacatatttcttctcgaaacgctatgggtatattcggacactattctcaacaggctagcccatcatctgcaattgatcctccgggggccagcggacttgcgcaaagctcaagcagcgcttgatactctgtagatatttgcgagtaatctcgtcactcagaatgtgtgcctgctggtcactttgatgcagcttctctcgtgcagatcgctcgtgaataccaaccatggtcacaccgataggccatgctctatacacatgttagtgccggttttaaatttaacagggtgtgggtcaacatacgctttaccgatgctcactcgtaggtaagcatcatttgcatcgacatatcgccgctgctgcgccttgtgaacgatttcaacgatcggctccaacagcccgtcctctagctcagccttctcgaagaggcgaaacaacggtgtcatattctcgcgtgattgggtcatggcattgaacgcttgttttccctggaagctttcccgcacagaaacatcacgcttcgctagtgccagttcccattctgacaaaaccatgttgaagtaagatcccaactgccggaaaaggaacagacggccctcttggtctttcgggatcttggccgggatgatcatctgtccaccaggcacaggctccagagtggtagggataggtccatcggtcaccttcttcttgggaatagcggcacgttgaaccagacgacgatatcgtcgaagacgggctcggtagtcctctccaaacaatattattggcgcattcaactctcgtaattttgcaataagctcctcctcctcgatatcttcctcttcgtcgccgtcggctggggtgttctcaggcagctcgggcagaccgagtctccgccgccgttcacgttctttggctgattcttcttgttctcttctcgtcttggactcctcggctagtcttcgcttcttctcctcgcgttctcggtttcgatccgcttcttcgtcttcgagcttgcgcttgttcgccatgcgctcttcacgttcgcgtgcaagtctctcttgctcttctttgtaggcttgaatgcgggcagcttcgacatcgcctcgtcgcatatatttctttgctggtactggggagctttttgcggtgtctttggcggatggtttggaggaatcactacccttagccttagagatctccttggacatcaacgcggcgaaatccatgttgggtgatgcagcgagctgctgaataattcgactgtagctcagttaaaagaatcgagacaataaagtagagttgcgtcaagagaagaagatggagtgtggaggcaggaaaagaatgttcggctttgcacgtcacccgcagctttcgacgccgcatttgtttcctccagtcaactcccctcaaccaaaatacaccgaacatttaccttcaaggacatttatccaagctttaatctacattcaactgatcggatatctcattatcttctgtttcttgccgtcctcgggactgccctaccatcatcatggctgctccgtcgcgagagggctcaaaaccctcaatcaaccgccagaccaccgcacctttccatttgaagctcttctaccgagtgaataactacaaccccctatccgactacagcatccccgcaccatctcgtcgcggaggaccagtcagcggcccaaactccatccgcccaacatcacccgtcgcatctccagcgccgctcccaccacacctggagatctacacatggcaatcatgcacactccgcgagctctcccagctcctcacttccgccctcccatcattactccccgacccgcctgtcggcacccgtctctgcttccgattgatctaccccgacgcgcgcggcgccgcaatgggcggccccgatgcgcgaggccgatacctgagccgggatttaggcagtgcgatcgttgggccgagggatagtccattgcgcgcagacgacgacgaagataagcaggatgcacgacctcgccctggcccgctccggttccagggctccgaggccgacaggcccctgcaggaggctcgtttcatcgttggggactacattgaatgcgcgattctcgcgccgcttgaggatgggtctgttgcgccggcgcttaatggtgcatctggtccgattatgggacctagagggggtggtggaggtggcatgcgcgcgttccgggataatggctttacgagagggcctggtcgtggtggtcctcgtgggggaggaggtggtggtggtggtggacctccgaatttgcctcgaggtgattggcatcgtggtgagcgattgcctgaaggtggacgtggaggccgtcgtggatgggcgccatattgagaagcgaaagaaagctggctcaaaggcagttttgtgaaaagggcgataaatacccatattatgtatgactatttagtttaagaccaatggaatcagtaccatctactacatgcactaccgttaacagaaacaagaaccatgtgcctcctggctaaagaggcgactagagctttatattgcagtatttcaacaaaataagtgtacttgattaaacttttgaagatttcagcctcttcaatcgtcgtgagtagctaagggtgacaggcattcatcctctagtcatatgacatccaggttagtgacgagtagacgcctatcagaagtccggacactgaacgagtgaaaaccgtctactacgtagaatattccgggtcgtacatctaacctcagaagtaaaccccagtttcacagccatgcaccaaatcaacaaaaaagaaatccatgcggtatatgcttgtaataaagtacacggccccacgacagacaccggcacaaaaagagttgaattcatcgggcaaacaaaacccccttccacactcggagtatccgcaacctctctcactcagtgtgtagttctccatatggcgccatgtcacattcgcagctcggtacggcttcgataacaaaacaggaattgaattatcgctagatgtctaccattcggcgatggaatctcctctgcgcttgccacggaactcgaacttgccctgcgatatcgttagcgcgtgtttctctctccgcaagatcagaccacaatgtgcaattgcaatccaattcaacaatgcgggattccatacatcggtcttgtaggcgaagtatcctaggatgccggggatcaggccggcgtagacgaatgagatccaggcctgacgcggggtccagcgccagtacttgtagcggttgatattgagttctgcgggtccgttagtcaatcttcaattgtagatatatcgtgtcgcggcatgctggttttgagagagatgctccagtagctcgggtatggttaagctagcgtgattcgcgaggctcgtccggggtcctggatcgtaggagatggggttgggggtatgtaccatagtatctctggagggccgggtcaaggatcacggctgggacaattattagcaaatcaggtcgcaggattcgtcaatttctgaaagctcacacttgttatggccagccattgttgcggatagcgttggagcgtagacacagaatcgtcaattgcaagcgtctctaggattgaagttgaaggtcacatgatgatgaatcagctgaatgatgtaatcagctttcgtcctcccagctcgtctatagttacgatgttgtgcatttcgagatgaaaagatgcatattattgtgtctctatacctaattgttcttcccaacctttttgaatgttctcattatcgatttctgtcgtgcagaggtgtggaggatatccgagatgatccgccaaccaaatgtcctccatatgcactgacacagcgtataaacaattaactagttaactatgtaagactcgagacattaatagtttccaaaacccattgcgccctttcataacccgaattacatggaagccgagaatttcccctcgatcgcctcgatcttcttcacagcacgctggtacccctcattgttctcgaggcgcttggcatactggattataagagggtatttatccttgttcttctgctccttcagcgctctcccggtgacagcaatgaccgggaaactcagcaggatatcagcagccgtcaactccttaccgcagatgtactcgccaccctcaggagacgtgcggagctggtcctcaaggaaagcgagattaccatcaatgttgcggttgaggaagtgattatccacttgggcggcaaccatgccggtgataggccgaatgaagaatggaggggcgttccgaatagctgttgaaaataaatgtcagctgcttcaaataatagttacaacatacacatcgggggccatgatccatcaacgccatgccatgcatgcatgcatgcatatgcgagaacgaacgaaaatgtacattgtacacgttgaccgctcttaaaaaaaagaaaagaaaagaaaagaacacttactgtcattcacaagactcatgaccaagaacggcatcaggctgccctccacgtagtgcatgaagtagcggtagcgcatccactcctcggtctctccacccacttggccctcgctgcccgttgtgtagcgttgtggtactagcgtcgggcgcgcgttaccaaagtggtcacagaggtattccatgatcgcccccgactccgccagcactagcggttttgcggcgcccggtgcttggatggtcactataggtgacttgcccagtgggtggacctctttcaactcggccggagcgagcttgtcggcgcggcgtttgaaggtcttgagttcatattccagtttcagttcttctaagagccagaggatgcggtggcttcgggattgctcgagcctggatttatgttagttagtatgattctgagcaatttgtgatggggcgtaccaatagagtgtgatcttgcagccttgattgttggccatgatttgttaatattatgaatattgtatagttgaaataaaaaatgtcgagtcatgaaaaaagaaaacaggactttcaagtttaagtgcccacacgtggatgatgtcaagatgggaccgaggcaggtttatctcccagaagggataaacggccgagactagctgatcttgtgttcatatttcgatcttgttgcaatattgattattatatcaatcggattcagatcttactgtgttgtgcagtgattattttatcatgtgaagatgtctgcttggtgcggcgactatccgtcgtcaattatgtatttgctgcgtggcttatcgacctgttcgtgttgatcttccccgcactatcaggcctcaccagctatacatagattatatagattattcagctctgcagctaagggagcattgatgtgagaaggacctggatcgaggctgagcatctcgtattttcatgacagatcacatgtgggtgttctccgcggttgaatatatattgatacccgactattctcgcctgtttacgagcctcatatcgatgatgaataatatgttgattcgtagattccaaatacaaacgcatgtttatgtctatatatactccggctttagagtctcaccggctccgcgtcaagcggaaccaacacatgtccctccgtaaccaaggagttcttgcacgagcgagctgcagccaagtccgatagattgccgagtgtaacctcagcgatctcctcgagggcctcacgcgtgaagaacccctggtgaccacagatcaagacattagggaatgtcatcagacgcatcaacacatcgtcgtcgatgatctccccagagtgatcattatagaacagctcgccttccgcttcgtacacatccaacgccaacccgcccagctgcctcgtcttcagcgcctggatgacagccgtggaatcgatgagtccaccgcgcgaggtattaaccagcaaagacccgggtctaatgcgcgccaacgtctcctcattgataagatgcttcgtctcctccgtgagcgggcagtgcagactaacgatatggctctcctgcagcagggtatcgagatccactagcgtcccatacggacggaactcttcaccggcaaacgggtcgtgcgcaagcagtcggcacccgaagccgtgaaagatgcgggcggctgcaagcccaatgcgccccacgccgacgatccccacggtcttgccatgcagggtattcccgagcagaccttcaatattgaaattgccctcgcgcacgcggttgtaggcgcggtgcgtcttgcgatttaaggtttggatcagggcgacggcgaactccgccacggcttcgggcgaataggccgggacattcgccacgaagaggccgagctcttcggcggttgcgaggtggacgtggttgaatcccgcgcagcggagcaggatcgcccgaatcccgtaggcgtagagagatcgcagcacgcgctcgtcgagggtgtcgttgacgaagacgcacactgcgtcgcagccttgggctaggggcacggtctcttcggacagcgcgaaggcatggtattggatggtgcacaggtcggggaagtgctgctcgcgcacctggtcgagataggtgcggtcgtaagatttggcgctaaagacggcgagcttcatgatggcgtatgtgttgtgatcttgccccgcggggtttggatgttggactaccattgccaagtcatgacgccatatcgtatgacacctgcaagcggccgttttggtcagtcgtaggttgtatatctaggttcttccccagattttccgattgcaacccgcatttgcagatctatattctgtattcaactggagatcgggatcgggatttgatctgaatactacctacccacgtggtagtgttcctgtatgcatcagccatggggcggaatagtcatgcactactctgtacagagtagttagttactgaaagcagttcacaacttctctaattgaagtatgtaataacacctcggcaagctaccaatgtcccacttcccgaggtcttctggacgattacttttttcagacatgcaggcaattcctaatttccattgcgcacgagttgattggacccgtcggtctcacgacttccgcggctccggtagccgctggcgggcaaggccaataggaagatggaggcgataacagccaatcagcagtcgatgataagaagagacgccccgggcattctggttggctgtgtcgttagcccgacgctagcgaacctaaggaatcccgacgttttcccttttcctgttttcttcatttcctaattttcagttttggatagatgagggcagtgaagctacatggtacatgaatgttagatattgaatctgtttaaagatcattccaagactgtagggagaacagagcacgagtagagaccaacacagtcttacacacaatataattatgcgaaccttggaacctcaggtagatcggaaatgaacccatcggacttaagtggagagaccgcaaaaggaaacccgtcactggggcttcatccagcggtctgaattcgattaatcacaaatagcggtcaaaaggagggcggatgtgtaggttgtagtgaggatgctgatttcaaggaagaacaaagtacaacatacatagttcgtgacaagaaggaatagagtcccagtacgcggaaaagacacacgggctacgagtacttgccgctacctggcccctgcgcgtgagtagtacccgccccgaagtaccgcaaagtacctagtatagagtgctaagtaccttcatgtatgtcgtacctcaagtaacagtatcattgtcctcgtgtacttcatggaggagcatatcgcagaggaggatgcttctcactcgacttcacctcctccctcacctcctttcgccctatttattggcctctcgtctgccactgtcactgttcacccgttccctctccatcttctccactgaacccactctgtgcgtaagaaatacggagtagcctcggccacttacagtcaaccttttcttcttgcctccccggctgaacggctctgtctattgtccttcgattaatcccaactcctttttgcccctcggtatctgcacttttcgccgctgcgctggagattaccctttaactctactttaaacattccgcctcccacctttcaattcgtcacctaacattcatcctcttcccatatctcaacttcaacttctacctcaactcaactcaactcaacctccacttacatcctttcattatggcgactcgtgttatgaccaccagcccggctaccaaccaaatctcggtctatggtcagccctcgccaaccaactccgtcaccaacactccctccaacaattctcccacctcccctcgcatgtccactgcgtctctgcaccaactgcctctgcagtcgcgccagctgcgtcctctcaagggtcccctctatgtccctgcagctctgcgacctaccgagcgaccccagaaatcgtctcctatcaccccacctcgcagcgtgcatggctctctcgacagtttaaacgaggactcagagccgatcactcgccgttccaccatggagagccagtccagcgaaattagcgagagcgcccagcacgagtggatgaagaatgagcacctgggtgaggtgaccggtcttccgacccgtacacactggaaagtgagtatctgagaaaaatatttccatctttccttccttgggcgtctttatagggattgggttcggtgtggattgcgcagttcttgagcaaatgtcgtgtgcgatcgtcattcctcggaaatggcgtgcttagtccaccgcctcatcccttgtcgcattccacatatatcctttgatcgcattggtcattggtcactttcttacaggtcaacttactaactttatccaggctgactctgcctcttccaactgtgattctcctacttgccgctcttcctttggcatcttcctgcgtcgccaccactgtcgtcactgcggtcacgtcttctgtgcttcccacacacctcacctcgttcctcttgaccaggatgcccgcttccaccccgatggtgtcccatcgcgcgcctgcgacctgtgctggagcgcccaccagcgctgggaagagaaccgctccgaccgtctgaacaagatccagcacaccatggatgctcagcagactggcatttccgtccccgattctatggacatgaatcgcgagcccaacgtggccgacgccgccgcctccgttcctcgtgactggaactggagcactttctaagcgcattgcctgtctcctttggtcttcggtcactgtgactagacctgcaactcggcgtttcacttgatctttttatcatcttttcactttatcgagtcgtgctcagcgtgacctgtttttcttattggcgaccatggctcggcgtttctcacaagccctggaccctgggctttgtttctgttttctgcagtcattttatgactatgcatcatgcctagaggttctcatcggtccttagcgacccgtttatgtttctgctttctttttttccgccttgcgttgatcagacactcatcggtctctagcggtccgattgatctttacttctgattctgttttttgcttcgcgttgatctggataccccgtcggttttttattgcggcgcgatctcatttgatgtttcttctttcctagaccctgatccgatgcctgagggaatgcgcttgcaatttcccagttgatatctagttcgatttagttcgatctagttgaatccaatccaatccattgatattgatattgaaccttgacctctctcaactcgtagacaatgtctaccctctatactttatcatcctgtagatctatttatccaaaaccaaccgccggaacatcccaacatgctcaatcccctcctccacccaccttcccatcgactcatccgtcacaaacccaagcccagcgtacatcccctcgacatcaacctgcgcatgcacaagcaccaatccccgccacggacccagatcggcacccgccccccttctccccctcgcaatccccgccacagcctcatcaatctcccccgcatgcccagccgcccaccccaacgcaacctccaccaaccgccgcccaagtcctagaccccgaaaccccggcacaaccgccacccgcgtcagcttaacacagggctcgtgcatccagtcatattccggccccgctgaagattcaggatccgtggtctgcgcgtgcgatacctgcggcgggggcactagtcggattgttcccaccggcgtgctcgtcgtgtcggtgtataggacccagtgccagctgcggggatcgtcgctgtcgatttctgtggatgcggtgcagtgttgctcgtctatgaagacggttttgcggatttccattgcgtcgttgaagactttggggtttgtggtgctgctgctggtgtcgaggacgagtttggcgtttgggcctgggggtggttgtattgatgtgctgaattttgggatttgtgccattgtgttggtatggatattgggtcttgactcttcaatggtaagtaatgatggtggagatttggggggtggaggagttagttaggtcgtagtagagggccgatcctgatatagatctaggcgagatcagccgacattgaacgctacctacgcttgattggaatataattgaatatgaagatactatactcttatcgtagtgaaactatcacatcttaagccaatataataagccatgacagccgtgtagttatctagtcccaagggctgtatacatccaatgcaaacagaacaaacaacatcaaatatcaaaccgatcgcaaaaatcctcaattccccgaccaacattccacaatccaaatgtccctctacttcgatgcagtcgcaatcctgaccgcgccctcctcaggcggctccttcaagtcgcgagtctacagcgcccgcaacctacgcgcctctccagcccagatctacgcactgatcaccgaggccgcaaaatgggacaccgtgctagcagatgtgatagacaaatccggtattctcgcactagagcgcaaggtgagctgaccccaagaaaaccaccagatatacctacctactgactgaccaagtgatttccctctagctcactcccctcctcgctctcctcctcgtccatgaccacctcctcgcgaagaagggcattgccgcgccggcaacgcacacactccgccagacggtggagcgccacaaggctaggctgaaggccgagttcacgaaagcgcgcgtgcgtcgtggatgcgcttccgtcgagcaattcaaggctgttgtcgtgcgcgagaaacggctcgctgatgggacgagccatttcgtctacccgcgctgggtgcgcgttaataatatccgcacgacgcttgaagagcagctggatactacgttcaaggcttatcgtcgcgtagagagtcttgcggaattggcgccggaagacgagatggaaagtaggaagccggagccgaggttgtttgttgatcctaatattccggacttggtggctgtgccgttcggtgcggattttactgcttcgtcggcttacaagaatggggagattattcttcaggacaaggcttcttgcttcccggcgtatttattgttaggtgaccgcgggcctggggacccgtgggagggtgacttggttgatggatgtgctgcgccggggaacaagactacgcatttggcgtcgcttctggcgaagcagcaaaaggggaataagaacagcagacagagaatcttttctatggatgcatctatcacccgttctaggacgctgcagaaaatggttggcttggctggggctgactcggtcactgtgctgcagggtcaggatttcctcgccctggacccagaagatgaacagtttgagaaagttactgggttgctgttggatcccagttgttctggtagcggcatcatcgggcgtgacgaggtccctcagttcacactccctgctgcggcaccatacaaggcgcccaagtcacatggaaagaaaagaaagcgtgcggacaacgaggaagaagcagatggccagtcgaaagttaccattggaacgccgcaggtagcgcccaccgatgaaaatgatatcccagatggcacggtcgacccagagcgactgaccaaactatcaagcatccaagcgcggatcgttgaacacgctttgcgtttcccgaatgctacccatgtgacgtacagcacttgttctattcacctgattgagaacgagggcgttgtggctcgcattctgaattcccaggtcgccaaagagcgcggctggcgtctcctgcgacgtgatgagcagcctgagggcttgcgtcggtggaagaaacgaggcgtgcgagaggagcggccggcggagggagagacggggccatcgggctcggtagatctctccgacgaggcactcgaagcgtgcatccgatcctggcaaggcgacgcagaaggtcttggaggatttttcgtcgctggattcattcgggaccctgctcatgtcacggccgttccagcgaaggaaagtagacatgatgagagtgaaggtgaaaaagatgaaaaggacgaagacgacgaagaatggggaggattctccgattagacaaaagtaaataaatgcaagtttgcccagcctgaaacattcccaaggcatcttttaccatacatccaagtcctcggcgtattatgcagtttaagacttgaacagatgtacagacgactaaaggaatttccgtgaccggtttcggacctgcgagctggtatagatgtccaacttgacagcaaccaagacaacctcgtatatcccggtaggcccggtctgcacttgcaagcgccattgtccagtccgaacaacccagggcttatcgtccgtattatcgacccgtggacgtttggctggaggcacactatcagcgccagcgccagcttcagccttagctctcgatatcatcaaatgatgagggtcttgttctccatccacggtgagatcagtttcactgtcgacacggaccttgagtggaacttggcccaatggcggatgtgaatcgggcaggtttaatttcttgccaaccgtctgtagcaaactgacaattctttgtttcgaaaggcctaggaagtcaacacgcatggtcccacgatgaatcagactagactcgtcgccgatctcaaccaccagatcggcggcgttgtcgtctataaacggacgcgcgtatgtgaccattcgacccgacccagaaaccgtattcaagatacactgaaccccagacggccgtacatcctcgagccggatgacgatttccaaacgatggctgaagggattcgtcgttatctgatgcggtatcaacttttgttctaggccgcgcagatggaaataacgacagtcgcgcaggagcgcagcccgatgatcttcgtttctaatatgtagcggatacccgcgcagcagatgcaggagctcgtcgaagacattcgcggatcgattcggcacgcttgggggaacaatggccgggggtcgcaatagaccctgacggtccaggcccgggaacacttcagacggggaagcgaagaaggcggcgaatccgagggtgaagaaattcggggtatcgcctggacctgaaaatatatcgcgggggatctggaagtgtcggtcgccgatttgaataaagcattcggactcgaacagctgggacatcaatcggggcactgttggtcagcatacttctagggtacgggtacctggacagaaaatgctcacatgtgtagaattgcgcatctgcgaatagcttcacgaactgcgcgccatcttgcggccggacatggtagcctggatgcacccatcagcctctgtcacgttgtgtttgtccatggaccctaccctgcagatgtctagcgatctcgtggaatgtcgtgggatcgcgatcgatataaagggtcctggtgttggctacatctggattctgaagcaattgaagctcgaagaagcgtgaaaagtaggatggagctgttggaagggtcagtgtgagttaagacagttagacgggagaacaagcgcgtttaccatcagaggcaattgaagcacccgacagacgaaaggtctcggaaccaatttggatagagaatactttctctctcggcagactacatttagagcgagtgggagtgggcttgtccatcttttgatgcgaaggtcgaggtcggagcggagaaattacattttgcctgacgactaccggctacctacgacataggtacactacacacacactacgcatacacttcacacatactacacactacaattataccactgagccaacttgaagttacctgaaattgaaactagtttaattggacctgaattttctatccacgctggctccagtctcagctcaccttgagtctcacatggcgctgaaactcggcaattctccccacagacgtgccagtcagcccctggcttccgagaaagaggggcggatctgcctctccaggaaacttaggccgtgaaacggtcaggtaaaatggagacttgcacggtcttgactggtcgagatactcaattactccaccgccacaagagtcaaaagcttcactacggagtccttctccactcgaccgaggctgctatctttgggtcgcgaggctggctgaccgtcgcctaaagttactggaagagcagtccatacagagtactttgtctatgactatccacgctaaagatgaaccaggttggactctgcatacgtacctgttgtcatagtgggaccttgtcgagctagtactaggtattataaacatctgtaccgtgctcaggtgcttctgtctccttgctcccaaatctctttcttattctcatcctaccattcatcctatactactggggcttgatctacgacagctttgtctgctctagtccttgcaacatgccaaccctcactgtttccacatacaccccgagggatgtccctcttccgccagcgccgtcggccacttacttctcggagttgcagtggaaaaccttctatgcgctggccgacgcagttgtgccctctatccacactgcagcaactaccaagtcatcgaacgaccgggtgatttcaaatgcagagtggaattccgccgtgtcgagcttgtcaacggctatctctggacctgacgccgtaaaccttgccacccagtacctgcaagaaaatgtctcttcgaacccgcaattccgggccgcagtggagcgactcctgggcgactatgtgaatgacgagggaagaaatgggtttggtttcatcatgtcagcgctcaacacccgtgctggttctctggtcatgacgggctccaccactccgatccaggaccaaccgattgaattccgagaaaagatcttgcgcggatgggacacctctcgattggctcctctccgcgccatctaccgaggactcacggccattgttaagaagtgttgggttatcagcagtccaaccataagcccggttctggggttcccaagcatccctattcatggcgagcaggtcgacggtttccagtttgagtttttgcagttcccttctggggatcagccagaaacgattgaaaccgacgtcgttatcgtgggaagtggctgcggcggtagcgtggctgcaaagaacctcgccgaagcgggctatcgagtgctggtggtggaaaagtcctattcatacccgaccaacacgttccccatgggcgcgaatgagggatataccaacatgttcgagaacgggggcgctgtctccagtgacgatggctcgatggcggtcctagcgggctcaacgtggggtggtggtggtaccgtgaattggtcggccgctttacagacccaggggtatgtccgacagcaatgggcggatactggtctccctttcttcacctccctcgacttccagaaaagcttggaccgcgtctgtgatcgcatgggtgttaacgacgatcatgttgagcataactaccagaataaggtggttattgaaggcgcaaggaaactgggatatgccgtgaaaacagttccccagaatacaggtcacggcgaacactactgtgggtattgcacgttaggatgcgcgtcgggtgggaagaaaggcccaacggagtcgttccttgtggatgctgctcaggccggcgcaaaattcatcgaaggattccgtgccgacaaagtgctattcaccaccgtcaaaggcaaaaaggttgcttctggcgtacaaggaacttggaagtcacgggattcatacttgggcctcgctggtattggggctgtggaacgtcggctgattatcaaggctaagaaagtagttgtatcagctggcacattgcaaagtcctcttctgctgttgcgtagtggtttgaagaatcctcagattggccgaaaccttcatcttcaccctggtaagaactttctttcacagcacattttacaggcacttattttcttctacagtgcttgcggctagtgctgtctttgatgaggatactcacccctgggaaggctctgcgttgacaacggttgtcaccgagtttgaggaccttgatggaaatggacatggtgcgaagattgagactgccgcaatgttgccttccgtggtcattcctatcttcccctggcgagactcattggagtataagatgtgggcggccaagatgcgtcacagcacgagcttcatcgtcttaaccaaagaacgcgatactggtcgtgtctacccagatccggtcgatggacgctgccggattgattacacggtatctgcctttgaccggaaacacatggtggagaccctgattggcatcgccaagattgcgtatatctcaggagccaaagagttccatactgtttaccgcgaccttccccccttcatccggccagagacttcagaccccgaggcccctgaaggcattaacaatacggctctgcagagttggattgccgagcttcgtgcgaagtcccctttgaacccggagcgtggtttgtttgccagtgcacaccagatgggtacctgccgcatgagcaagtcacctaaattaggtgtggtggacccggattgtcaagtctggggcactgacgggttgtatgtcgtggatgcgtccgtgttccctagcgccagcggtgtgaatccgatggtcactaatatgggtatcgccgattgggccagccgaaacctcgcgcgggcgatgggaacggtacccggcgagggcaacgtgatggctcgtctgtgatgtcatggtagattgaccgctactagttctagattatatgatatgcctagcatgattttgtattaaaatctatctcttcctcaggtttagttagtttcgttataagactcgttataagattgaggtgcttgatgaagccgaatatcatgtctaattctttccctgatcgggcgctaatgctatttctcatttatcatgttgaatctaagccttgggatcctgacgcttctcaataaattgcttctcaccaaaggcctccttgacgccctcggtctcgagagtgcgctcataccaagcgaccacggaggggtactttgcgcgcatctcagcatcgatagccatggagaaaccccagaccagggcagcggcaacggtgatatcagccaagctgagcttttccttgctcgcgaaccaagtgcggcccttgaggtgagtctcgagacaatccaacgagcgttccagacgcgcgaggttggtctcctcgactttctcatcgaagggccggataccgagacgcggcagcgccaactgcgtcacagggtccaaaatctcaccctgcgcaaagcagatccactggcggatagtagcgcgctcggcggaggtagcaccagtaagctgagcggcagcggggccgctctcggcaatgtattgggtgatggcgtctgactcgaatagggttgttccgtcggcaccctcgaaggcgggcactttacccaaagggaacttggacaggaaatccggggtccggttggtcttgcccatggcgaattccggaaccgccacttctaggccgttcaggttggccgcggccagggcctagcaggggttgttagcgcgtgattgcatgctgacagggggtcgagattggtaccttcatgacccggggactgggctgataagagtagatagtgccgaatggtgccatttcgatcgtgatgaggtgagatacaggtacattgtagaattgaggggtatgttttatatgaagctaaagagcggggcggaatcaggtggaaccggatttctaagctggtgagctgatttgaagcacaaaacaggaattgcgcggtttgacatatatctttgtcgttttatataaactcaggagatccatgtgaaattactagcaactggttatcaattcagtatgaaggagcttaactcgcgccaaatccgactcaagtggcccaccttcgtgagcacagtcagaacttaatgtcgacaagtctccctcggctgttacggcgagggtcacctgcacaactggcccgtatggctcgacgtactcgctgagtaagcgccaggggtattcacacaccgcggacatgggattagaaccttagcgattagtctactcaattgcatgagccatcttgggaacctccactctagttcgaaacctccatttcaggatacgctagtagctagtcctaacatcagctttttgtctcttcggaccgaaacagttaaatatacaagaaattagggtcaaaatcaaaatacaaggaatcgcagcacatcccagatctactaggtcacgccttgcatgcctcaccgaggcgcatatagttccaacaaactgcaagttgggtcagcttttcacttcacaatttcggggtaataaagacgcactcgtatgtcccatgtccttgccaaacaagctcttcatcagatcttcgccatcgcgtgtgccctcgctcgggatataactgacggccgttttaccgagagcgaggcccatcacagacgggaacggctccaaggtctgatactctggctttccaccggtgcactctgccagcatatgctggtggatattcatcgccgcgtaatggcccatatgcattgcaccaccacaacgcttaatgccttcccactcagtgaggtctcctactgcccaatgatgctctgcgttagggacggcaccggagaattgcagtctgcagaggtattagaaatgtttgtgcgcaacttggtggaggaatagtcttacgagcggtgcactttgatgtatccctcctcattcaatacctctttcggcagatatgtcgatgttggaacgcttcgggagacggcgtttagaacatggcccgttctgagcttttggccatcgctgagtgtgagatcccaggtccgtgtcccatttttaccgtccacagcggtcgtttcgataacgcgttgtcctaggataacctcgacgcctgtatcgcgcaatatagtacctacgcgctcggcaaattcatcgggcaacggctccgaagataacaagcgctttcgagagtggatcagagtgatcttctggtctgggttaaggattttcaattcggcagccatctccacgcccacggcgcctatccagaaagacatgttagcgggtggaagtatcaaagagggagggagcacacgtacctccaccaacaataaccacaccctcacgggcttccttcacatccgtcatatgttgtctagcctctttgaggaactcatctcgccgcagggactggggaacagtggggaaagaccgacgcagcccggagcctgcaatcaagtagtcatagggctccgtgcggttactgttggtctccgcatcgacaatattggcaactttagcattgaaatccaccgagctgacgcttccctggatgaatttgagttctgggcacttgagcccgggaatatcttggaaacgagtccatgcctcgggcgcgaacttttcacaggctagggcctttggggatccgatcaggtgaactacatatgtgagcgggggtgtaattgcgggggaattgtcgatccttggggagcttacagtagccatctcgcttatcgactacagttatctgtatcggaatacgatgtgtaggagctttggcatcgggattacagttgaaacgcgggagacgaccttgcgagagatcaatgagggttaatgcagcagatagaccgccataagagccaccgatcacaagcactcggaagttgcgtgatacagttcggacaaagtcattggatggcatggtgagctgagaaggagaggtgtgacgagcaataaccgaagaaagaggccgagaggaaagcggaaaaggagaaggaaagtaaaggagagaaaccgagaaaaaaagccaaggaactgagctatgtactcgaacaaaaataaagaaaatagttatatcgtcatatcgtcggattatgcgagtccggatcttatcagattgaaagcgacatcggatacagcgcatccatggttgttccttggctttctcttggctcggattatcagatccgagggcagccgtggaaggtgaaacatccctcggttgtattgaattcctccgacagcacagaccctagtaagccaagttttttttggcaggaccgacatggtggctgatacacgcaaaagcatatattaagtttccttccgtcaattgatcttcgtgtgtaatattaggatagaagagagctctatcacggcataattacatgcacaacgttgaatattgtatgaaccagaagtttgtttacggttggacccggtggctgtaatgcttgtaaagtaaaatacacttagttccgtggttcgatacagccacgcaacccaaaagagcagtgatcgtcgatcagacaagatgagcatctaatctgattctggaagtgctcgacccgacgtaacaaacgaagaaaatgcgtaacaaaatagcgcatttgctgcaagatccgcttttcgtcattctttatgtacttggcgttacaagcgttgagctcgggcgaatcacaatagaatctgataacatacgcccctcatttaattacattttttgtttcaaacagattttcggagttgcaattttattgtgcacgaggttcgtttgtcaatgggatcggggtattactgcaaaaaatctagtctctatactgggtgaacacgagggctgtacaatctgtgctccttcctttttttttttaattcgtcttctgacgctgggccagcaccgccatcgccatatcccgtagctccaccttgcgaactttgccgctccccgtcacaggaaccgtgctggaagccccctcttctccaaatacaaacacatgctgcggggctttgtgtcgacccaaagtttcacgtgtccatgcgcgcagttcgtcatcggtcggacgaccggcgcccgaagcgattgcgataaatgctccgacgacttcgccatatttgggatcagcaatgccaaccacagaggccaattcaattgagggatgcgcggccaatcgttcttcgatctcgaggggatatatgttttcgccgcctattcgataattagaaatcgcgatcaatgtctacggtggggtgcaagcttaccgcgaatgatgatgtccttgaagcgaccagtaattgtgcagtacccttcggcattgaaggaagcttcgtcgccagtcttgagccatttgacaccctccgcatcggttataaatgtctctgccgtcttctccgggttgtgccagtatcctttggtaagctggtagccggccatgcaaagctcaccacgctgaccaacgggaacgatgtttccctgggcatcgataatcttggcgcgagcgtggggcaaaacctttccgacggtggttaatcttgtgtggatgctgtcggtggtgaaagcattgaagcaggtaggcgaggcctcggtgagacctagacttggttagcacttgatcatcaagccaatgagagggatggtaccatagctactagtgtattcagtcatattcaattccgcgaagagccgcttcatgagtggccgcgggactggggccccagcaatgatgcctgtgcggaggtttgagctgtcaaagttggggggcttgggaacggcaaggatcgcctcaaacatggtggggacaccatgcagagcagtgcatttctcgtcggagatggcatgcagaaccgccttagggtcgaaggtttcgctggggaagacaattttggcgccatgggtgaccaccgcgagcatgcccaggaccagcccgaagcagtggaacaagggcggggggcagcacagaacatcaaaagaggtgaagtccatgcgatcaccgatgaaacgcgagttattaaccaagttactgcgcggggattagctatatttaacaacgaatcgtcgtacgtggtccacatactgatgagttaacatggcagctttaggactgcccgtcgaaccgcttgtgaattgcagattgcagacatcgtccggccgcaattcggcctcgcggtcctgaagcacatgtgcagcctgcgacagaccacgttccatgacatcgtgataggtggtgaaattgttgtaactttcgcggagaataacgatttcctccaatgattccgaggtcgcagactttttaggattagggcccagtttgagaaggacttcctcgagattatgacggccaatgcgtggtgtcatgaaaagcattcggcattctgaataaaagcagaacaaacagccgagattagtatggagtcaataatacggaagtggatatcacccaccactgtgattcaaagcgtaatacagctcggagggggtgtatgtgttgttcaaaacgaccaagatagccccaactcgtgcggccgcaaagaacaccgagatgtactgctcacaattgcccgccataattccgatgcggtcacctttttgaataccggaagccaacattccccgagcgagacgatcggtctcgtctttcagctggccgtacgtccatcgggcaccggtccaggggaagaccaagcactcaattcgcccatactgcagtgcttgcagcgtcagcagctcacccaaggtaatgtccagcagcgctggctccgtcgggcctgcgaccagagacagctgcggagtagtcggaggctgcacatgcgacagcgtctgctgcaagcgctgtacacttctcggggccgccatgataggtagattgaaaggtaaggaaaaaggaaatcaggaaaaaaaacctaggacatagcgggtttatagatgtagccgacaataccgcgacaaatttcgcacaagataaatttgattaattcgattaattccattccatcagatagcccgggctccacatcggagctgttgtattggtaatttcacgggtttggcttttatgcttggttgactcgacgccttggcgtctgacaagactccactcggtcttcaagcgaaccttggaaccttggcaggatacgcaagctccgagggtccttgtaggtcgatgtatacatcgaagatggtccctgcatataacgaaagtacttactgcgtatgtgtttgcattctatagggcatctgcaaggtactgggaatgtttcccatgtacataatccgatattgatcgatcgaaaaggctgcaaactctagcctacccttgtgaggagctagttcatgacatgaattttgctgcttacggtggactgacaccggaaatttgactgtctgcaaaatataagatatttgaatcttttcgtaagacatctacatcggtacaagtagaatcctctcctcggtcatctccccggggatcgtctggtaaatttcctgtcacggtagtatggcccaggcttggatgtcaggatctaaccggcattgaataacagaaaaaaaactccctcgtggcactggaccccactcaggatcagataaattgtctgcagaattccatcccgggttatcaatcagtgtgaagatgtccaagtggagcccgttgtcgacgagcccgggacacacgtgtgagttggtgggaatacataattggaggcactgactcttggcacatcctggcattctgaaactagttttcgcttttcgtctgttggaacttgtaagacaaggaacaggcagtgggtcacagcctagaccatctttgtcggatattgtaggcttagaagacccggtatataatatataattcaccagcttcatcaaaatctacctcgccatatataacaacacagctaccatttaccattgtacgagttatgcaactctggtctatacctagggcttgggaatctaatcaatcgggctgatctaatcaatcattcccgacatcggcgccttcgtgtgggacccacctaaaaataccataaataccgctcgaaagattcaatgaatgttacagagaattagtagggaattggcaggcaaaaatagtactccgtagtctatactaggtacgaagtactgtatgtactccgtaccaggtacatatatgcattgggtataaaaaagctaattattgcgtaatatgcacggagtatgtcaaggggctttgtcgtatgtcaagatccaatccactagggctgaatgccggcgtcctagttgggcttctatatttgttctagacttgatgttaatataattgatggagtgcttagaggccttcttaatttacattggactaaccctcactactagttacgtcatggttgctttattaattattgtaacttcatttctcgttgggctgtctgtctagctgttgagagtggactactctatcattgcttgtcaaccgaacaacaaagattccccatacgatcagattaaatcagattgatagaaagcaggtgcaaaaagcctatcattggcatactctgaatgcaaatagcaaacacaagacatggatacatctcaggtagacggcaaattagtacataggattctacacgccgaacttatggccctttggtacagaaagatcgggacaacctttccagtcgcaggtgttctgctaatagttagtataagtaattgaacgtcagagggggtaaacacaccttgtaaacctctgttccccaccatttgaaatggttgctggctccagtaaagaaaattgtcaagaaaatcaagacaccagcaattcccactgacgagtccatggcagaactcagcacaaagttatacttactccaccagctatgcagacgcttccgaatgagccagccaaaggtgagtccaacaactgcccagcttccgtaattcattccggtcgcagggggcaagtaattgagcccaccgaggaacaggggaatatgaacccttctccacagtgacttggggtatcggcgggtcatataatagacgggaatgggtagaatggcaccgacgatgaagaaataaagcaaagcggaatagccaatttggtttgagaagtaacgacgaggacccactgcaccccagatcaaggaagtattgaagtgggttctgctgtaaggacaagtgaaaccgttaacagcagcgctagtgcagacgccggtgatatgattcagggcccaattgaggacaccgagcgaggagagcgtgccgataaccattcccacgcattgaaccaagaacagttttcgttgcgggatcttccgggtattagcatgattcaactatagtaggaaggaaagggcttgcatggcaatagtaagcgagtttcatatcctgggcaaagtaaagacccttgatggttgtgatgtatccgatgtcaaagaaccagatattggccaggactttgccctcaaagacgaaaccggccacgatacggcagaagatgtcgatattgatcttgaggttagaagtggcatagaccagggccaactaagattggtcagagaggtgtccaatgtgtaaatcggaacttcaggtagactcaccgcaggataaaatatcagtgccacagtacacgccagcagaacaccgtaccatctcagttcaacgttccaccactcaacggcgaacatcgacatgaataaggctaagacgcatgcaaccaggtaccaccacaaaggcacatctgggtctccccgctcgtcctcgctgtactctctagagcgaccgggaaaagactccaggactagccgaggcacccttttggcagcatcggccatgacatgacgcttttcaaggacaacccaaacaagaagagcgctcagggtcgcaaatgagagcccaaacatgttcaacgcgtaggtcactggcatatagacctaaacgttccacaagttagcagaatgtcaagttttttgagtttatagaacgtgtaaacataccggggaataagcaaggtacttcttaacatcgagcttgtagcctgaggctgcattgacaatctttttgactttataaatattcccggtattgtcgaatactgtttgcacaagttagatttggtcgggagcttgaaaggatgggttgtaccttgagagctttggaaaggcaggtagcctgtgttccacacattggaatagtatagagcaacagccacaatccaaatccagaacaccagggaaacgaagacgttgaaaactgcccacgatgggatgagcaagggtgatccgacgtaagatatttggctccctattggggtcagcacggtaattgacctgaaaggttgtgatactcacaatcaaatgtaagcggcaacagccccattccagaattcattccgaagatctgattgactactttgctctcaggcttgatccaacacgggaagctgaaatagctaagcgccgggaagatgaagtctgggaaccaataccagcagaacgagatggaaaatgccataccgaagaaggcatagcgggacattttccaagtattgtaactaccatctatcagttccattcaccgagacaacaaataaatacagggaacttacgtcacttgcactttttgctggttgacatgatgcagcgttgtggtcaacgcagtaacacccagcaccccaggccagatcagctcttggggaacgaccacaatcgcccggaatagaccagcaagacagaacccgatgaggaatgtggagaaagtaatgagaatttggaatccccatcctgctttgtaaccgtagaacatttgctgctctgtcaggacatcggcgccaagacgaacgtagatactgaggttggacataataaagatcaagacatgttcctagaataacctttgttaaactgattactgtgacgttgccagggaacatacctttgtattaaaaggacccgggttgagctcaaatgccagtcgtcctagaggaacggtccagttcgggacgattttctcccaaagctttcccaggggataagccaacaagaggacaaccgagccggaaattgtcaaggaaggtgcacggagcgtgtagagtgtgttcaacccgctaacgatgacacaaaaggcaattcctatcacccacatacgtagagtgaggacgggctcagtaggatcatctttagctatacctataccagcagcccgcaagatttcggtctgtgaatctatgtctgcagtggtgtgagaatctcgcaaaaaaagaaggaaaaaaaccccaagccacagcaacaggcagcagcagacttaccggaatcggtattattttcatcctgaacttcttccttttcccgaatgtttctctccagcaggttaatatctgtgtccttgttggcttccatgatgggcatgaaggaaaatgagatagaaagaaggatcagataaaaggatcagataaatagacaacatcagataagatgcagaaagaacgtgtaatccggatgcaacctcggactcgatccgtagaaatacacgaagtccgtattcccacggttctcagccctatagggctggctctcaggggagacaagcttcattctctgtctggtccagcgtgttattggacaggttccagttcaagcggggctgtaatactaagccagagtatgttgttgcctagttaggaaatacccacactcaacgacacctggtttagctttagtcagtgtctagatcttacaggtcagatcattttggttattttccgattagggcatgattttctcgcctctaacagaaactttgggctttccttactttgtagactaccaacaagtagttagtttgtaggagtactgcatatagtagttaattgagccactagtatacaacatatttccaaactctcccagtgatggaccattatagaaccaccgagaaagaacaaaaagcttccactgtgggaaccttaagtgtccactcaaactctttacaagccttctcgtgtcattttacaggcatggttttatcggccgaggcacgttcccttggcccataaaaccaaggtttacggtctccacggtaagcatttggatcctttctcagtggacaagttcgggttaggagtgataggacccctcttgtggacaaagtcaaacaagacactaatacggagtactaaaatagcagcctccaggcgtggctcttctgggaaccgtacggatgtactcgtaaagaatggatgtatgacgctcaagccatagaggtgtcatagggccgccatatagactcgcataattcgataaatgcagcgatgcaaatcaacatcatcccggtatgtagaatataatgggccaactccacggcctatgtttctccagtcaccagtaaatcctcttctaccactgagacacgcactttgatgccccagccatctcgcccaccaatccaattcttccgctttccgaccttctggattttctgcacgtcattttcgagctcttctctcaggtgagacgggtcatcagccactttctggatggcaattgtcaagtccaggccttctttcttgcccttcttccccatgcccttcttccatcgggccgagggaacaatgcgaggcttagaggtgtcgacacgcccggttgggtacagctgggctaggacgaggccgagttttccaaggtaacgtgtccaccaaacttcctccggtgtcaagattccttgtagctgggtcttcaaatccatgtctctgggtggcagttctccgccataacgttcctggagcatcagtgccaggagggcacggtggtcatgtggaataccatgcgtggaggctaggatcccagtgctagtgctgtacagtgcggcacttgaggaaagttctttggccattgtggcatgataatagagggaattagcaaaggcctggataaggtgaagactgatggaaggcgggaatgatcggctggcagatggtcgaggaagggccgccaacaataaagcggccagtgcctgggccgacgaaggcgcgtgacgggccgtggcgacctccaaggggtcctgccgacggacaaccgggagcatctcacggaataacactccttcccgaactccaccttggcaaaaatgggcctctttgattccatacggtaatgactgcgccagggtattgactaagaatgccaccgaggggacttgcctgcgtcgccggtccgagacccggaagatttcatgtgctgtccgagccacctctttgagagctttggtgttctcaaagtctttcttgggtgcggaatacccattaataatcgagatggggtaactttggccttttgtctggtgcaggtataacagaagatagccccatccccgaaatcctcccccggacaggtagagaggaaagcccccttgctttcgggccttgtgaacaagctgctcagggacgtcgagggtatcaaaagcggcgcggaagttgtttgccatttcctcgcggaactcctctcgagctttgtgcgcatcctctttactttttccgcgtgcgaggtcggccagtttctgggtcaatgcagctgctccatagggaaagctgactgatccttgggagctcatatgcacgttgcccgcatgcgatatgatccaagtcatctgcatgctgccaccccccaaatcaagtgcgagtccctccacgtctgagaagctgctggcaattccccatgctccgattactccctcctgctcctttcgtaatgcttccaccgcaatcccggttttgtggaggatggcgtccatgaactcagaagcattgaaagcagttcgagttgcttccgtggcgataatccgaatgttctgagcaggaactccaatctccacgcaaacaatctggaaacggactattgcactaacgattcggtcgatgacattttgtggaatggggattcgattgcctgaatcgggatccagttgggcctcgtagagcgaaacattgacccgatgaaaatgtacagtagggatgacacgggtcgtaggaggggagagatctgagatggaacaacggatgccattactgtagtatttgaagtcagtgaacagtcctcacacgcacattcaaagggaacgaagaggggatttgatctgcctacctgcccaaatctaccaccgcatgaaggtacgcattctgccctggatccgcgggcggcttttggccattcaatactggaatttggcttcctcctcccatttaggcaattggttgaagttgctcaggtgtactttgtgcgttgaatctcgaaattcagctgcagaggacctctggggaaaaactgcgtgacatcatcattttcgaccgcccgctgttctgccggacaattgtagatgtgctgtagctcccaagtacattttgtttgtttaaaaagaatcttaatgttaaatatttgtaagacataaagaattccaactcttaacgagtctgtggtcatttaagttcattgtggtcggatacattgagtacatcgtagatacgcgttattctcggcaactggcaaggcatcaacccttgccttaggcttaggtaaggttatagatcacatgactagatttcacatatttgtcaataaaagcttccattaactgactggaatcttgcatggaaccttgtctgtaaatacctgagtaggtagttcaactacaaaagctttagcggagaaaattccgctggtgttgcaaattctgactctgtatgtatgtagccctagaggtacccatgtacccctcatatatatcacaagcattaatcataagatctattccgtacaaatccatacaatgaccacaagccgcaagtagagtaaatatgtattcaagtaaccgaaagcaaatcagataccaatagagtagtaaatatctacctggctcgttcacttcaatttcgaccctgaaatgggctgatccaatcatgatgtcacgtggcgttgtctaatcaatcagatcagataaggcgtctgttttaactagggggattccgagtccacaactcaaccccattccttttttttcctttcgagttctcttgagaaactccgtgtcagaatccgagccaattcttattcagacctcttccgaagtttggtcctacctacgagatccaacggtccaacgactcagagacttcgccgatccacatgggtccacctgattagtgcgattatcggcttactgccggtgctccgcctttcgtcttgagccgttccttcactcaccctcagaccggccgactatctgaggactcattatgttgctctgttggctggtaatcgcactcgcccaaggtggctgggctaatccagaggatgagcggtgtgtgacggcggtctacacggcatacaactacatatcatttgctggcattctctcacaaggcaagcacagctgggaatcgcaatgccggaatccgctcaaggtcgcatcgatatacgccgcatccgatatatattgcaatgagcaggaacggacgataggcatggcgcagctggctaaccagtgccaagaatatgggaacctagagctgctgtcgagggaagcggtcgccgaaaacctgacagacgatgctataaggaatatgagaattgtcgactatcaagagctgtcccgaggcgaaccagtgaatgcgcctgtccttctttctgcgtcttacttcaacctaatgttcaaaacgattgtgagaccttctggaccttgaatatgctagtcctaaagcttattgatgtcctaggaatcttgggaacttgtgacttggtcacatcatgcatttgggtaagtctgctcaagctggcaagcaagacatatattgattaatcagttatattggctacgcctattggggtggtatactatctttggggatggcctatcgcttgagtgattggctattccatcgccgacaacgccgtgtagagcgtgtactcgaatccaatgtatatcccctcatgaggtccttggacgatatgccgttggtgggcaccggtcttcactggatccagactcatctgatgatcccaccgcctttggcagcatcacatggtcgatacctgctaggcttcacattctccaccagagtcgaggcgcttatagtcgtgggattctggacgctcagcatcgtattgagtgtcgtgggctatcacacctttcccggaaatatttagtaggtaccagcctgtggaagcgagatgtgcaatgttgacaggtagtctagctggcccgatgtcacaagccaggttcttcgttattctgcagaccgcactgggatcatgtcatttgcgaatttgccccttctatggctctttgccggacgaaataatatttttctttgggccaccgggtggagctttgcatcgttcaatatattccatcgccatgtggcccgggtggctactatacaggcagtagtgcactctgtcctttacattgtcatgttccatcaaagtaagtattgctcgtttggctttcaatgcgcgctaggatacttacagtcattccgacagcgggcaaagctgcgaggggtatgtcgaagacctatgttttgtggggtattttggtaggccccccaatttaattgatcccaagttggtcgatctctaattcatgttgtattagggcacattcgtgatgattctgctgttgatcacctcattggatcggatccgaattgcgacatatgagctcttcttgattgctcatgtcgtactttcgattctcacccttgtcgcgtgcttttagtaagtacatccccgcgatgaaatttctgcatctatttctaacaattggcagccataccattatatttgaaggaaacgaatactggaagtacctgtggcccacggtagctttatgggtcgttgatcgattccttcgaattgtgaggttgtgttactgtaaccttcacgtgagtctctcaaacagacttgtgaaagtttctgagagccatatggtttacgacgaaacggccgacgtggtgcgattggaggtcatactaggaacgccttcactgcagccttcaccagggcagtactacttcctataccagccatttaggcttaccggctgggagagccatccttttaccgttggagcatggtcttacgaaataggggaccagacatcattggcgccaaaaaacgagggaaaatcaactagatcgcttgatgtttcgcatgtgccgcttcttgcaggcggtccctccgatcaagattatccagaaagctcagaaaacatgtcgaagcaggagaaattgtcgaagttgaacttgactttctgggtccgcccgtatgacggttggaccagacacttgcgccagcaatgtctgagctcaccagccaagactagcaaaacgaccattcttcttgaaggcccatacggagaaacctttcccctgtggaggtatgaatcagtcttgattatcgtcggtgggacaggaatagcgtcggctgtgccttatattcaagatcatctccgccggtctgttgaagactgggacgaaagccccgaaatggagaagacacgagtgcgagacatggagcttgtttggaccaccaaacaagcggcgttcataagagatgtctctcgccgggaactgaaacgtgccctcaaacgagaggacttcagcgcctctttttatgctacgcgtgattccaccgcatcctctgaagatcctaccgattttggattcgatatccagtcaggtcgaccccaccttcaatccctgatcatgagcagggcctgcgatgcatcctcggctggaagtagccttgcgatcctcgtatgtggcccacccagaatggcggatgaagcgcgcgccgcgacacatcttgcgatgcgacagggccaccgctcgatcaaatttgtggaggagtcttttacgtggtagcaaaggggctacatgagaacttttgtgatgagtatacgacaccatgcatatatactgatgaactgtgtagaggttttcgaggctagaacttgaccttttctttgttagatagacatagatagaatatcttgcccgtacgttgtatgtggcgagttccgggcttcacggttttcgcgttttccgcagtgggaattttcagactagaaagggtcactgaattcgacatacggagtactccgtaccgacgtgggaatggagatggggttgttgtggctgacagcggggcgtgatgcacgacgcaggagcctcctacgccacgcatacgactatcgatttcaagtcgagaatcaccaattctaaattgacctgttcaactgttaagcacagaaacatgagaaatggggcatcaatgcgataattcacgaaagaagagagaagatcgatgtggtgagaagtgatagatcggatttatcaactatccactacggaggaaccgagacgtcacacgcaacagaacaaatagcgctaccccatggccgaagatcacaacgagtaaccctgaattttgggttctcgtgactttcatatgcacctatgcatctcttcccgtcggagaaacataccggcagggtccgtcgatcgacaggggaaaacttgaacacggttatggatcgcttgaaagtcaataactcatgttggccaagcctttttccgctcaataattcacgggggcatccactccgctgcagcttcgatgctcggagaccatcgggtctttcttcccccatcagcttgaatgagaagatgagagaacggatgaagaactaggaaagttataaaaggaaagacctttccagtgatagttctttttatccatcattcaactctctcatcgtcaaaacctttcaagccctccaaatctacctaccttcttcaatcactttccacattctccaaaaaccgtcaaaatgaagttcttcgtccctgccttcctttttgctgctaccgccatggccctgcctggctcgggccatactgcttcccattccgacaacgaggtcgagaacgcagtgaatcagtgtggtaacggtgcccagatgtcttgctgcaacaccttccaccagaacaagaatatcacccagcataacgttggtgtcctctccaatgtcctcggtgccgttggcggcgagggtctcggcctaggccagggctgctctcagtttaacatccccgtctctggtaagtgatatatctatgccagtgaactaaagcatgagactgaccctattgtagtccttggtgccgctggcctgaccgacttcctcaagaagaactgccagcagaacgttgcctgctgccagaactccagctcccaggctgtatgtactcccccaagacgaagaagcggaacagagtcactaatcccaatagaacaacaacctcatcggtatcgccgccccttgtgtcagcttcggcagccttctgtaaattgcattccatcgagtgcatgcagccttttccgccctggacatatcaacgagaaccatcaaacttgttaattgtgacggtctctgcgggaagggctagtggatactagtacggagtatatatgtacacttgcaacgcctatcaggggcctgttttatccgatcttgtcaggccagctttctcaaatttgtgggaccgctgttcgtgagcgtggatcctgccattcatttctctttcgtttgtcaccagtctcggggcttttaattatatatatttattttttattgagaatagaatgtttttaatttgatatatttcgggtatagtgtcttccttctgaatggatcttgaaggggggactcgatttcgaaagcgcaacacatttcatgacagctattctactgtatctctaaccggatagcatcgtattgcacataaacagtggcaggtagaacggcagtctctatatccgttgcattgaaaggtaaatgcaatcgcagcacattgtcaccgacatgtaaccaatccgccgggaactccaatttcgatccgacctggtagcagctgacagcagaccgcacaatacagctgcttgattgattgaacccaacgacaagagtcagaggatctgcctgattgttgatatagctttccagtgacagattgttgtatgactcgaggggattccacacatccgtgttaccggctgcggtctttgcggccgctaattgcaaagttaatgtggctgttttgcgcttgttcaattgcttcgagtcaagcttgaaatgtatgttccagtcgtacgtcgtgtcatactcgacgtgggaatcctttgccgttggcccgaagaccgaccaatgggcagagttgagatcagtcgcagggtcgctagttccaatggtgtaattaacaccatcagggaaatcagagcgccagtcataggctccccaatatataagatactcggggggatgaagcggatgggttggatctctcgcatttccacgtcggaactcccctgacgacttgtcgggaatcccaattcgccagagctcagttcctgccgactcttgggtccaagtatcatgcagtgcagtctgccttcctgcatgaatgatgattccgtcgcgtacaaagtcgccgaaaatgccctctgcgtaaatagtgagtcggtatttcccttctttaacacgatcaatgctgaagcttccatcttgattgatatcagtccagtactgataggagcttggaacggcgctattatcttggaagtattggccgtcgacagtgagaatggcaattgggcgaacggctcccttgggaagcttcacggttcctctgacactgcctcgctggctagagggagcatacccgatgacatgctttgcaatagaatcatagaactcagcgttccaatgaggatctgctaattcttctgcctcggatctcagttcctcgagagatgccgagcccttgccgccattgaaaaggtaaaattggggaccgaaagttcgatcgaatccgtttgtgatgtttggcgtgccctctccatgatgatttgatacgatatagttgtacactataccgtccactgttaagtcggaatggagtggtccctaatagatgtcagccgctgcattccaccgtgctcgatatcgcttaccccataatatgtatcctagaataaatttgttagatgggattcgacctggtgagtattggagtaatatgaccaaccttggtattcatgactagccaagctccatatgttaccccatttgaggtgctgccgtcagcatatagaccatgaacagtattgtttctccattctaagaaaacaccatcatttagtcaatcagtaaccgtagaagataggggatcgaccatacgatttgagaatgtatatttagtaaaatattcagaaaattgggtgtagtacgcgtcgcttggcgtgttgttaaatgtccaggttgcatcttgaacaacaatctccttggaaatcgcgtccttgcctggcaggggtgcggtctggacctcgctagacgtcagatgcgtccaaagatcggtatttggacgaaacaaggtccggaactcctgcaagttgcgaagaaagggcgtggtctcattatggtaggccaatcggctgaacatatgcaaaccagtctcgccatcgcgcaggaaccagtactgttggaattgctgtcccgtcggagtatatgtgtcactcagaatcatgcctccgtatttggttccagttgaatctgtgccctgcactacctccgtgctcggggatgtggcaccggctgtgtagaagcccgaagggatacagtaacagtcgagatagggccctattccagtggatcccgactgagtgcccaacaagtcctggccatccaaagttagatcgactatctggccgacactcttctggaggacagccgtgaggcgagcattggcgagagtgatgtgagtctggttttctgcgatgtgtagcgccgtggcagcagtagcccctgccgtgaaggccgtcaataaggaagcccacatgtggggcatcggggtcgttggttttcttttgacagagtcatcgtcatgaattgtctttataaatgactctaatatgccgggaaatcaatagcccgaatcaaggattgcttgcggttccagttcggttccattcctctttgaacacggattttgagatccacgaatgaattgggaatccatgaatcataccaggaactcacggcttagtctagagagaacgcactccacatcaaccccaccgggggagagattatggggaactctggggatgcggggctttgacggagaaattgctcggtcattgctcacccgagttcgtcgctaaaggggatattttcatttctgagatgtacggtggtcgtattttcgatgaaatcgtatagttatctcatgaacatttcattgtacaggttagacatgttcatgtaaaattgacccatcctagccaagagtcggacatgtgttgcatattcccatcaagccaaccgagaaataagtcaggatcgtcgatatccacactgtcaagcaagctagcatcatcaatcaacttgtcactagtttcagtgtcttctacggcagaggagagaccttcgacggagagaacttggtccaagacatgacggattgccttttggccctgctgtgcgacacggtacatatagttagaatcattgggttgaatgatggtgtccagatatgccgcgaaaagagtcaaattttgaatgacttctgaacgaggaaactccggagaagagcttgttacaggcgatcgggatcgacggagtaattctgcacagagaacaccagcagaaggaagacccggtaagcatacctagtgagatttcagcgttccggctttctgccacaatcaaagctaaggtcaacttacattcagtccgatatctttgatgggttgtctagagcgagtcttctgggaaatcataataaccaatgttttcagtatctctcgagcgatgccaagaacttcctcgggttgcgtctgggtgcgtttgccgagggtccggtagagcaggaaatcgttgtagagaaactctatgtgaacctcgaaaaggagatcatattctactttggaaatgagtgccccgtcaatattaggtttccaatgaagaaattcgggtagtccctgtcgtaattggcgagattcgcgtgaaagctccctgagaatgtcagcaatgccctggctgtgaaattaaactgtcagcgtactcgaccctttggctgagattgtcgagttgccgactcagtgaaagttccaagaccttctcacggaaaacgctagtgatcaaggaaattcgaggccacgttcccttcatcaagcttgactccaaattccatccagtctcctcatccagtcgagcaatagccgcattacgaacagcggaatcggcaaatacttcctcaacgctcaagtcaagtggcatttgaatatcacagtagcgccagctgatgagcggcgggcggcctagaaaagtggcaagtcctttgtccataaaatacgccgcgaccatggttctttttcgcatctcagaaagaaagaatggagcatttttgctagaatcctgatgcagcccgagcgcaaacagcgttgtcgataactctcctaattttctccacggtcgaaagtctaaatcccgttagacaatgcgagcaggcaaaagaatgggataacgaaccactttcaccatagactattgccaaaagcgtgacctgatgcaatagaagccaggccacaatgtcattcacaattccagtgctatcacagaactgaagacatatgtctcccacagcagtcgcagttacagcgagactcttcggatccatcatattcggacgcatgaagacgcggtcactatgagggacccagtctgtggctagacctgttagagtaaagagcagcccaatcaactcccatctcccggccgcagcagactggaaattttcccatgtcattgaagggtacacatcaagcgcccggctatgcgtttcaaacagtttcttggacaaaaagaaagctcgctggttggtgttcataccctcggtttctggagagttccacatattctcaacgagagtaaaaaccatgttcgtgactggccaaccgagactccatccactccatatcttgaatcgagcggagacgacatccctataaaacggaagattctctagaagcgctaagacccgggcaccgagattgatccgcttttggtcaactggaaagttctcatggcctgtgaggtatggaattctgtcatgaaatccgtttctcgtatccgtgaacgcatcgcagtaactagtttgccctagaaatccaggggccgagactgacgcttttttccgagtccagaaatcggtctcattgggcagtcgattgatattactaggagtatctgattcgcacacaacgcggcgttttttagaagggcgtgttccagtgagtggctgcgttaatggtgctgggtgataggtacagtggagaccgcggcgctcacagcgtccacagatgggacttgtatgatcgcatcgcaactttgaggtacgacacggctcgcatgatgataattgaccattacggcggggagtcgccattataagacacctggttgattagaggattggcagtaaaaaaagagactgggaagtagtcgagcgtgttagctatacaacatagtatgtacttgtcggggctcggccctcggagctcggagttagatgactaatgatcgggtcctatccgggggccggtcgggggccgtacattccgtactccgtatggcggctcgttattatccgtctatgtgggatacctcagcctaagtcgggataatgagttatgtactctacagtacggaataaattcaaatggtattggataaagtatccggtgttcaaccatatattccaccatggtgttcaaggtgttcgacactactttacccacgagatttaccaatgcaaccatgtatgtcatgtgaatagtgtaatatagggggaaaagccaaattcggaatcggtgaaagagcgttagatcatcggcaatgaaccggcggaagaggcggatcttaattattaggcgacaaaagctaaaaataatgacaaccttggaaaggcgacgatggtggccggatcctggtgtcgaatcatgtgcccattcacattgaacgtaaatgaaagcgtcaaatagctgagatatcagtcggccgtcggcaaataagatcatcgcatattcccggggtggagctcggagaccccatgggacagcgccacccccgcacaacgggggagtgcacggactaggccccgtgttctgagagacaggagttttcctgagaggcaggcccttgcctttgacatcctgctccctccaactcggctcggtatatctcacttgtcgcccgcgatcatcgcaaataatcgccctattactgcaactaattccttgaccccccaccctacctgtccatccatggcgaagagacgtcaaaatcactcctgcgaacaatgcaggaaagcaaagaaagcctgtgatggctatattttaaatagcggcaaagccgtattcattgaagctgagagtacgttcaagcccctcgacaaccccctcttccccacacatccatcccttcggtgctcccacaaatatgaacagctagctaaaatgaatccaccgcaaagattctggcatgccctctccatgctcgtactgcattaggacaagcaaaacctgcagtctgaaccctcactggggccaagatgatcggcaaacagaagagggcttgtcgcgctcagaaaatatcggactagatgatgaacaacgccgggacaaaaggcagcgaattcagccaccagagaatgagatcgaggcgtcagtaacacccatttgtacggttccttgccaaacttcacccacagaacctttacatgcgcctctgccagaaaataacgtggttgattgggacgcgctgtctgcgcctgttgcccctcatcccattagtcagtcagccctcgcgggggctcttgcgggatacgataattgttcacacccaggggacccggggcaagtgagctccatagctgtacccgacaacaagcacgcagaccaggtcgaatataatggtttggatagcctcatggattcagcactggccaattccaccacccacgattctcactactcggactttaattcacaaaccttcatccctgatacaccccaaacgcttttctacaaccccaatcccgctttctccatatcttcagtgttggaggagagaggccaaaacgaattgtggagggggcacaaaaaacggaaagatatctgcgactcgcaagactattttgccatgacactgtctctatttggtgcgggccatctcgctatggaaaattcgaaccgagttctcatatccgagagccttctgcggatttatcatgatgttctagagaacaacctcgggtgctggttggcagaagatacatgcccatacaagatgcggcagaggcggcacgagccactttccatcaaccagagcccgagttcaggacaaataccgtccgaatggggcgtatcatggacaaaccgcatgtactgtcgtattaaacagctcgatcgatccgcccggtcggcaaagctgattcatctctctgcatcggaaaatcgagcggcttccaaagccctcgagctgtctatcatggcatttgccacgcagtgggcccagggaggacggcgatgggatggtcattggctggtaaataggtgcgaggatgaaggaatgcgcgacgaatttgggcagacactgcatcgatctgtttgggaatgtgcaaaccaggcgctccaagatgtcacccacgtggagtgttttagggtggtcttcgctgagttggttttcggtcttatacagaagccgtcgtcaaactatttcgatgcacgcgcaaaggataggcataacaccgatcagaacaaaagcttgaagccttcaacgctggcacaggtcatgagcatcattgatcagggggaaccgccggtattcattgagcgaggggctcgcaaaatccacgtgctcaaataccgattcaaagcgcgccaggcaggctttcacaatctcggcactaaactagacgagcaagtcccggtagagttcagtacggaagagacccagacggtcggcgtcttgtactggctcgcaatcatgtttgacacggtctcctcatccatgaatgagcggccagtcgtcgttcccgatgacgaatgccaacacgaagctgcacaggagacagtacgaaatcccactcaacccccgacctctagccgccggtgggaactcgacctctacgcccaggaggatcccgagaaggcactagccatgcgttggccttgcccgtacgagttcgtgatcagggccctccccagatcagcagctgtgaaagtgctgctcttccgctacatctcataccttcagaacgccttgaaaaatgccgaatgcaacaaagtcgtggaagacattatccaacgcacgatatgcgtgtaccgctactggatgaagacgcacggggctttattccgcgacctgaccagacactacgactcagtccctccgcggatcaagagctggttcccgtgtattagcatcccctggcatctgggctccctcatgctggccgacctgatcgagttcgtggatatgaacagtctcggctgcgatgactacatggcagagcgtgaagatgtctgtctggtaaccaaaattcggaaagaaagctcaatcgacatggcagaccttgcagctgtcctgacccctggacctttggggggaataggtctaaaccaactgccgggctttcacttcgccgtcaatgagagcccgcttttgactgagccctggacggtgcttctcgttcgggcgttttccaaagcttcaatattccacctgaaggaaatagaaaagctgcagaagtaccagcgtttcgtctttgatcatgagagcaaggccctgcagacgagtgtcgcacgcctcgagaactgtgttacggctctccgattcctgggtatcaagtcagcgatggccgaggctatttctatagtactatctgaatcgctgagtaaatgccgaactctgggctgattttttgacaagccaatatccccttttttgaatctcgtcatatgtgccgtttgctatgggcttacatgtttggtgttttgaattttgatatccatttcgtgcatcacgtttatttcaaggctatgttagagttcaagcttatctccattgaacaagtacaacctgacagatatgacctttttttcggctgaaaagaccttacttgatactaagtgagtgcgattgtttttgtgcgccaataattgctctatccatcctgtaatagttagccagtctacgcttctttctgccaggactcagcaagacatcatcatcaataaatcctcaagtcaacatgcagattcctccctccttcgacaaatggcggcatatatatggcatcctgctggacccccagtaaccttcggtatacaaatgccgcgtggatatcgcatcagccgatcatcgcacctacctataaggtgccagtcaaagaaaaccggtatccaacctgagcggtcacgtcgacctgaaggattctcaccctaattattaccctgtctattgtccactcgctcttcaatttacaattcagggatattaccaaccctacaaaatcagacatttgacctttcgcagagtgcgagtgattggtctgatttaattccgaagcaaacacaaaaaaaaaaaaaaaccatacaacagtgaggattcgctggtagtcacccacccaactactaactcaccggcgtgttgcttatagttatgcggtcaatagttcggtgggtgccgcccgggtgataaggtacgctatagacagggtgagaagccaggtgagaaatcacctaagtcgcgcgactaatgcattgaccccttcagctgaacagaatttcattggaccgtgtcgttccccttgatggcatcttggcatctacacatacctacaactagaagcattatacaccccaggcactaagcaggttgaccgtgcaatttgttgggatcatagcacatgaccttgtttgtcaggactgtcacatgccaactactaaatagtctcctctctcttctcttcttcttttccccttctcatcatcattaacggtgatcatcagcagttagcacgaatacatctttgcattgctgatctctattctcctgactcgctgtcacaattccaattggttggtctgcttataaagctttcttgaaatcggccgggcgtgcgccgcctccgtcgtccggtatggattgtggcttcctttgttctttggccggaagaaaggatcggatattagaccatcccaattcccttttacccggccactgcgggctttgtcccctagttacttcgtagcctaagggtacgatgggaagaccacgacttttgtgatatctcatcccgtgatttcttgctgtctgaaaattattggctcttggtggctcatcggtggttgtgttccccacgattgattggttactagcatgtccgtacatattggagtatagggaggatcgaaatcagttttaccacctacatacggagaatctttcttgaaccctccttctaaacatgctaatatcaatcttgtgacctctatctttatttatatatatatatacatttcgtttctaattttgggtttttctttctttctggatttcagcttgacctatttcatgtagatactgtatagttttaacttcaactttaatatgaattttcaaagtcactgagagactactatatccttttcagagttgatacgacttacctcgatcagattacattgatagttctttcagttatatcgataggcgataattacttctttcaagacagaaaccaattaaactgaatgcatttttttagatccagtcaagaatctagtgaccaactagaaggtattggattataactcttcaatcaagtaagactaattgaataagcataccatagagtcattgtccagtctaacagactataacgttctagagtccgttacaaccacatataccggacaattcgcgttacttacattctcgcaataataataaacgaaacctttaaccaggtcagccaataagcagtacagcataagaaatagcacaatatacccactatatatcctagtccttccgtaactcctttatcgagctacctaatcctctttctctatgccataataacacttcaaacggcttcatcttcctctctatacgaaagagcataaaagcattatcctagtgactgaaaagcctatcccttgagtcaaataggtctaaagaactatctaggctcacagtatatctccaacagccttctctcttcagaacactattcaacttctatatttattctattcctcaaagaactatccgttacctcttacttactcaatgactcaggcagaaagacagtaagaaaaggattcaatagctacctgatcgttcttaactggctcaaggtacaatatctattcaacttaagaaattggccgtgcagaaaatgtggcttaagtacggctgttttccacaccctatggtcgtaagtgcttgaaatagcatcaaaaggatttatatagacatcattacctgtagaatgtagatgtggtgggtgagagtcgggtgagagtcgggaatcctgcgggccggcgtgcgtctacgaggcgggcttggcgttttgctgttaaatttcaaacgcaaaggcgctttgatcggacttgatgtgagccagggagctttacgaatagtaggtcttggcagataaacaacaaggcagatggctgccttcgacctaatccaatatccattacgacaattgagctggtcgtaagttgtaacgaatgggaaaggaaatgatgaaataacggaatttataagcaagcggagcgggccgcccggtcagcccggtcaccccataacataagtaaatgcaacaaaccgaatcaaatttccactatggagtactatagcttagtttcaattataaatttgatgtagttcaatataggattctacagcattaccttaaaatccatgagtgtctgctaagatcaattgacggtcgttgtttacccctaaacaggacggcggtgaggatcttgggccctgtaagcacatacctgcctttaattaactacggagtcattatccctacaacatatgaggtttacggatcggcgatggtgtaatcggggctagactcagagcaaacaccagtggccacatcgattcccgcatgcagtagggcgccccgccctccacgccctttgacatttgttatataaaattatactccgtacaaaatacttaaagagatgccacagtcttgataacctgtaattgccagacttccgtggtctctttactggagcgtttagcagccaacaccaatatctcagcccgagtgaatgggtcgcccgaactcggcggaggaatatggtcgtgatgcccctccagacagcccaattacccttgatgagaaggaagatcctaagagatggccgaaaagcagaaaatgtgagagacctcttcgattttgaatctctaccaaagtaataatatatgggttaactgacgattatggctatatgattagggctctatacggtgattgtggcgctgatggctggagtaattgccttttgttcgagtatctatacagcaggaaccaaccttattactgtcacctatggatgttcgcagacagtggctactctaggagtgaccacctttctactagggtttgcatcggggcctctcatctttgctcccctgtcggaattatagtcagtctatgttgagatactcctgccttcagccgcttataccagtattaatctagcggtcgcaaccccatattccggctgacgctgggattgtttgtcctcttccaaattggttgcgcattagccccaaacatagccgcgctgataatctttcgattcttagccggctttttcggttctccgacggtcacaaactcgggcgcgtctatcacagacctctggccgcaaagcgaacgatcagtacctttagctctgttctccgccggtagcttccttgggcctgtttttgccccggtagctggcgggttcgtctcggaatacctttcctggagatggaacttctggttggtgcttattctaagcggagttgtctacgccacatgcgtgctcttccttccagagacgtacgcagccaagcttttgcgggataaggcccggcgcctgggagtcgtccagtccgggccctccctccaagagcagctcgggacctgccttatccgtccctggctgatgcttttcgcggagccgatcttattcctcctctctctctacatggccttcatttacggcattctctacctcgacttcacggcgtatccgattgtatataaacagtcccgcggctggtctcctggtattgcaggcctatcctttctcggaatgggtaccggcatggccattgccacgattgcctctccctatgtaaacacgattcacggaaaatacgtatccaaacttggtcctgtcccagaagccagactaccccaccttgtgatcttgtcttggctgatccctgtcagcctgttctggttcggctggaccgccctgcctccggcgcattggattgtagcaatcatttcgggggttccgtttgggttcagcctgatattacttttccttagcatcacatcttacctcacggactgctatggtccgtatggcgcgagtgcgcttgcggcaaatgcagtcttccgctcagtctttggagcggtatttcctctctttggaacgtatctgtacgacggacttggcgtgccgtggggatcgagcctgctaggtttctttgcactagcatttgctcccctcccgtgggtgttttatcattttgggccccggattcgaatgaagagcaagtatcatagaatgatgattggtgatggggcatagggtttcaatccacttctttctgatttcctctctgattatattgcaaattcatattagccaacagcggggtttctgaatgtacaggggaagaagaagaagaagaagtctataaacatacttctttatgtatgaagatattagaaatttttacaatttacttttgacactttcaaatatttattttgcaagagatattgatgagaattcactacagtggagatcccaaatggagaatcaatgttcactgtaactagatctcgatcgtttgtaggaatcaaaccttctacatatctctctcaccgcttcaagatatattccatctgatagaattaggtagcaatctttaaaattaccaaccactacttttcttaaagagattgaaaatctacaatgtcactattacatactatgattaattataaaactcaatttcttaaaatttcttaatattaataaaaaaatagatgataaaagtagtattcaaacctaaacagtgctaaataacagtaatttattaagatgacttagcagttttatacgtctaaattgagaaaggtcaacttttttaatgcaaatgagggccctcagagtgcccgctctcaaaatgtttttaatgaggtctacgtctccgtggcctacctaaggtcacctgaccatccaacatattgacggccacactccatcgtcacttccattcatcatcaattctattgattttctttcgttctcagagttcttaactcttcccctctcacacgaaaatggataaacaaacccagaccaggcgttgcgatgaagttaagcgactctacaagctacttaagagttgtgaatcttggtttctttcccccggtgatctccaaggcctcggaatctatagccagcaagttggcatgacaggtgacggctctgtacaatttaatccatgtttctttcggccttatccggaaaaggtgcttcaaaaatatccactcgatacggtttcgatggctgcggaccatcctccacagactcttcaacggcttaataacccccgggacttccagactctgttccgagaagtccagaatgaccctaaggtcgaaaatcccctggaattcgctaaatcaagatgggatacattaacacttttatatgggccggatgcctgggaagatcatgccagacagacacgttggcatattcaatcccagcagatgcttcctcggagagggctttcccgggactctactctcagcgatctaagatctatctacgaacggaggttagtgcactttgctttttctcttttactctactgtttttagggactcaatatactaggacgaaatggaagcatagcgctcctgaactatgtggacttaatagaaggaactattggcgtataccaagtctccgagaagattttcagccaagctttaacccacatgcaattatggaacttttatccgatgttcccgcaaatcatgcagagaattgccttactctccaagaagtaagcgccgtcctaaccgtgatggttgctcgaacatccgatcggccgttccgggaccacccgatccatccagttagtatcttacatacacttcctagctactagagatttcctaagcactcacttatttttttatagttattggttctttcatacactggacagaatcatggaagaataattcaagcttcattacatggagaaagcttgcttttgcaatattctcagctatggagttttgcggatgacgaaacggcaccagttgaactcttcattcgttatgatatgagccagccagttccgatagcctgaagagccgaatcctattattggctctcttgtcggccctgttacgtctatgagcttgaattagctatttaatacagaccctaccacaaagtattttacccacccgcatttttaccccaccatcacaaaatatatgtgaaggaacgaagccaaattgattcaatactgactaagtcgacatgctgtttacaaaaaaagcttggagaagggaaggaatgaagcaagcgagacaataataaggatgacgggcaaggcggtggcagaacggaagcgtgcggagactagaaagtgccttttgaaatttgacgcccatcgcccaccattatgcaaaattaatgcaaaaattaccctattaggctattttatgtacataaccagatcttggcagtaccaattttgccaagagtgtccgcatatgtcttggcgacgctaaaagtgtctccactttaacgggcgttgtcacagtctaaccactgcaacaagtcagttctcatgaactgactttgttatgaccttttggtctaatgggtaaacgttggagcagtggccgacggatctcataagtgcacctaaaatcaatagctagctttaactacgaaacaccggcttgataggtatagataatagataagcgttgcttatataaaagctcaccttttactctacgtaaagagctattttctgtgcctaagagagatataggggtggtgtaggaagaagaaaaaaagtgagtggtggttagcgtgatttcaaagtggggccaatcttaagtctctccctctaccttcttcgctgccttcttctgttcttcttctgttcttcttccttaacagcatcagcccatctataaccgttgttctcgaggtacccggtggagaatacatatttaacacccatcgaagacggaagggaggcgtcaacgtggccgctagcgaccctcctatctccgaggcagcatcatcaccatgattagacgtaggggacactattatgagattagcatattgcaattatgatctagactttgagttctgatttcatgtattcagactggttcaatgaagatcgaagacctttcagtgacaacgcaaaccgagtctgagtttaggtctacgctacatcgcccctgccattagtcgatgagcaaagcttaaatagaagcttgccttgaccaaagctaggtattatgtacgcatttttgttgccaagttatattcaatcaatctactggggaagagtgatttgtatgaacatcaagcaagaggactcactgttgggatcttcttcgacgacagtctttgttggctattgggttggtgtcagtgtccttgtcatcgtcgttcttggtagattgccctttagtagtattagtacaatctttgacgactgaagaacctagattaagagaactcacctgtgggccttttatgtcatcacttcttgcgaactcgtttcagcccctttttcgcactggtttgctttttacgatcatgcttccgcttgatcctggcagtttgctacatgaataagggtgtgtcagtaattacctggtcacttgctatgagacacgagtagcgtgcggcagcggcacggtatatctttttatatctataagtagcactaccaattttagggctatacgaacttgaagatatatgtttgaaaccttaagatcttttgcttaggatccacatttaatattttacgtagtactccttatctttaagtacagccctataacgtctcgttatactcaaaaccaacctgtctatcttcgacaatagcaatagcatccaacaacccgggcctacgcatttatatagtagcaacagaacaatgtttgtggcagtctcattcaatgaagtttcgattaaactatcgtctattggtcctaaagttgcaggataatttctgtatagatcaatacgacctcatctggtgcctcaataagacctgtttctctacctaggtaggtaggtacctagccctggaggtttgtgctgctttgtcagctcaaaacaacctttggtttcgttaatggaaaggcaagatttctcatctttctcccacaaacactcatcggaaaaagcagatttcaagtaaccatggaaccccctccaacaccccgccctccagcaccgaaggtgccctcgaccgtcagtcaatggagagccagcgcgcgcgattgccacgtcctgaccaaaaatccaagcaagctcgagtgtctgcacccaggttcaaagctcacgttcaaggaatatctcagcatgaggattattcggagggtctccaatatcaccgagttccccgaccgagaaactgaaggtagagccaaggagatggtcaagggggactaagcaatacagacgtggctctcatatatcgaaacggaccagtacccaaccgaccgaaagcttggcatgttcgccctagtgagaccaggtcagcttgcgatagtagcttcggattcccaggaaccttcccagacagttgaacttcggcgtcgagatcgacctcaagctgtggaactatcagcagataccgcgggacgcagtcctagtgctgccgcttcaactgcgccaactgaaccgtctactgccgcttcaagtgtgccaacggaactgtctactgcagcctcgaggaagtgggtcaagtacgccagagcggatggagaaccgcaggtgaaccaattcgtgataacgctttgacactcagcgtaggccagagcgtgaactgccaatggtcccctaatggtaatctgttcggtagcgtgtcttttggagaagtccaattaaccgcatatgtcgacggataccttatgggagtcaagaaaagcgatatttttgctattgtggaggtaaaggcaggaatccgggaccccgagcaatatccgttggtcgagtggcaagaaggcgcagaaatggtcagctggatcatgaatgatgaggagaatctgcgacatcatccattcgaaacgtgggtggagtgtgaatattcgcatattttcgtgctaagtgctgtaggcgcctcttgatctctttgaatcgacatgagatgtatttgacactcgcccgctaccacgaggactacgtaaagttcctaaagggagaatttcaagggttgaagagctaccccgagaatagattcctccacttgcacgagtacggcccatgggatatcggcaagaaatctcacatgagggacctggccgaaatcatcgtaggtttctctctccgtgtcaaagatgaacaggctagatcggctgtgccatcagggagtggtcctgacggggcgtgagcacaatgtgagcgatagacatgtctctagcgtgtccggtgcagtatcattccattacaacggtttctcgaaatcttttctctctctttcttcctttcttcccctatacctgttgtctcacatagaggcactctaaatctttgatcaaaagtgggtttccacatcgggccaataccacctgtccttttgtctcctttcatcaccattcttacctccacagctctcactgatacacgtcaagactcgccccgaaccgaaccggcttgctggccctacgccctcgaccccacctgccgctccgctcgcctggctgagagagatccgatctacaatagatccgagccctacgatcatggtaaaaaccatcacatcttagtcgcctataacgctaactactaggaacttaatcttaacccgctctatctgatctcggtaaccctataggtaggctgcgccaaaacccacgaaacccaaaacccaagccaatctatgggcgcctattagacctattaaatcgtaaaaacgtgacgttcagatgatgattttatttcatatatacattgaacttcttttcaatgataggcccagtcactatcatcctatcttgttcgcttacgagctctcactgacgtgcgtaagccggtgcttctaggatcggattccggaagtggggcatcagcctcagcattagaaatcccagtttgttcgtgactccgggcccaaagttgggctttacggaagcctaggccggcccgtaggcgggcactgtcgtagtctacctacccattgagacccattgaaattagacctagataaagcctataggcgacggttctgaccgcgctcagaaattgtagtgcttacagaaaggtataagctatataatttcacacctcatcattttcttagaggccatacgagtgaataacttccctgaggacaggggctatcaacaaaaaaggctgatcaatgttaggtggattcttagttgttgaggttagtatcacagaatagatggctaacaaatgatgcacatgtcacgttgttaaattgttccatctctgcctttattttcaggccgtagagtgagcaagtctttgcgctcattaagcgctgtcgcatacccttgagtacactgagtaatcaccctgtgctgtgaaatactcagtgaacaggaccctgagccccctcataaggcggcggcaccccgatcgggaaattcgcatccgcggcctaaaatccggtacatacagctacatatgtaggtgtcccgcagatccataaaccccggtgagtagattcgatcagtcttagatatgattctgttgggccatgatgcgtgcgacacctgggcagtcgggtccgctttggttagggtttgggttcgacccccccccccccccccccccccccccccccccccccccnnnnnnnnnnnnnnnnnnnnnnnnnnnnnnnnnnnnnnnnnnnnnnnnnnnnnnnnnnnnnnnnnnnnnnnnnnnnnnnnnnnnnnnnnnnnnnnnnnnnnnnnnnnnnnnnnnnnnnnnnnnnnnnnnnnnnnnnnnnnnnnnnnnnnnnnnnnnnnnnnnnnnnnnnnnnnnnnnnnnnnnnnnnnnnnnnnnnnnnnnnnnnnnnnnnnnnnnnnnnnnnnnnnnnnnnnnnnnnnnnnnnnnnnnnnnnnnnnnnnnnnnnnnnnnnnnnnnnnnnnnnnnnnnnnnnnnnnnnnnnnnnnnnnnnnnnnnnnnnnnnnnnnnnnnnnnnnnnnnnnnnnnnnnnnnnnnnnnnnnnnnnnnnnnnnnnnnnnnnnnnnnnnnnnnnnnnnnnnnnnnnnnnnnnnnnnnnnnnnnnnnnnnnnnnnnnnnnnncgggggggtcgggtccgctggaggtacggagaagatcggtggggtataaagggggttgtgcccaatgaggtctgaggtaaagtaaactttcatatttttgggaacgaagggatgatcaacgccaggttcggcgtttgagacattaggtgtctcaactccacaaaatcaccatgtgacgcgacaaagatcagcaaggttttcaaactgggtccggggtccggggtactaccgttgctgcacagtatctggggtaggtaattactttggggtaactactttgctgcagggcttgaaaatatattgcgtctatatatgtgaaaagagcttatttttgattgaaaggagtttgagtaaactaaatatccagggtacatctgtattgtttcccattggcctttcactaaatatccgtccctcgcgtcccattttacttggctgatgaacccgcctttcaaaacgcctgtacgcacgcgcaattctgcaaactaggtctaccaggtagagctgtgatcaatccgacttcttctgaagttgcgatagtcccgggacatggctagagagatcacccacgggaagccgcagagggaaatcgacggattcaagcaacaaagaaaagagtaaataccatccaccgaggcatgctgcgaatagcacagctcctccgccctgaaatgagatcgattgcgtcagtaacgagaaaattaaagataccgctaggggactcactatttggaacttcccagcaagtactgtctcctgcatagccaagtaccagtaggcagcattgatgaggccaactccaataaccacggtgaaaaggatatagacaaggacaaaattggtccggaaggagcagatcaagtaaaagaagcatagaagattgaaacaaactatgaaaaatcctgtataccatttgatcgttagaatcttgttcacgctttgctcaaaaagcaaggtcggaagaatgcggtggttgactaaccaaagctggcattgaaaccctccgatgtgagtcctgcagtgggatcatcagggtttggtgaataggctgcgtaggcattgtagaagggctgtagggtcgtggcgagggtgaggtagaagcatgctgcatcattgatgttattagtatttgacatatatttggaaaggccacgagcacagtatcacttaccaaaggacatgaacaccacggatgagaaggtgttaccgattatacactctagcaatccaccaacaagcaagagaatgcctccgaagaagatgtatgctccactgaaagaatagcgagttagcatgcgcccctgaatatggaatcagactgattccaattactcacatatgagcaattccattgttgccagctcctctccagcccatgagggaaaaagagagaggagtcaaggccatgacgaatcctgtgatggctctacgctggtgtcagtcatttcctagaaggggtgatcggaacacagctgccatacataggggttggattgccaatgatactccgaaggtttccagcaacttgaggtttcggattcaagtaaagcttctcaaagagttccggagatagcatgatgcttcctctagacctggtcctctcaaaggcactagagtctccattttccgcatgctgaacgtcgttggcaaagttcacgccctcggaagtgctcgaatcagatgttttagccatgtttggtaagatataatggtgaaaataggggtgttggcaaagatagaattaaaagcagcttcaaacacatggacacttcctaagcaatatataccgtggtaattactagctacataccaggatctaatgggaccaaactttccttgcctgtttggattctggggtaccggaaacgtcctgcgagcagctcacagcagaaaaagcttccactagtgagtctagacgggattccaaatgttgtagatctacatcgcccccgcgttgaagcagagcggcagcagatagtttgtgggggtgggcgtaagctatcgattcggatatacggagaaggagaagcagctcctgcgaatcaacatgcgaatagcttccgccatcgcgaaccccgcattccagcccctattcatggtcggaggagcggatgcgctctgcaagacccctagaacctggagtagtggagtgcggtggagccgatgatgcggggccccgtaaaaaggcgaagctggggttacagccaccttgccgccttggaatttgactggtcattcctcccatcctacattcccaacccaagtcggaaccgctccccacgtcgagaaactcccaccttcgcgaaacgatcaagatgtgtgcctcagcggttccaaacaagttcaccgaataccaagatagcacgctcacctgagcaagtggattggattaattaggtgcccccgaaaaagttataaatcccctcaactatccttctttctcgatactcataccatccgaagagaacaatacatcctcttcaaaacttcttgcctttattataaattttcccttatcggtctttccacaatggccagcgcagacatccagcagaatatcccctcgcacatccgtggagtgcccggctcagtcaacataccagtagcaagcttcccagttccctccaagtgtgccacatgtgaaccagaacacgttgcatcgacacttgttgaggctttcaaccttgccttggccaaacgtgacttcaacggcatcgccaacttattcggagacaatggcttctggcgcgaccatctagctctgacctggcagcttcgaacagtgcaaggccacgaagcgatcgtgaaattccttgagagatcttccgagtccagggacggcctgcgactcaagaaaatctctattgacagaagcacccccgttcgcgccccgaaagtgtggtcacttgatggagctggcgaagttcaaggtatccaatttttcttcaaggcagagacatcccatggctctgcgaccggaatcgcccgcctcgcgctgcagaaccacacgtggaaaatattcaccttgttcactggtcttcaagagctcaagggccatgaggagcttcttggacgtcggaggcccaagggcgcagagcacggtggtaacccggatcgcaagaattgggccgaaaaaagagccgactctgctgcttacactgacggtcgcgagccaagtgtgctgattatcggtaagtttctatcttttcatcattttgaagaacccagctaatccttatttcaaaggcggcggacagggcggtttgaccgcagctgcgagattaaagatgctcggagtggactccctcatcatcgataaaaacgagtccgtcggggataactggcgactccgataccgtcagcttgtcctgcacgatcccgtgtggtacgatcacatgccctacatggagttcccagcgacttggcctatcttcaccccgaaggataagctggctgaattcttcgagtgctacgtcaaaatgctcgaactcaatgtttggaccacaaccactatcaccaattgcgaatggaatgagaagactgccaactggaccgtgaccctttctcgcaaacagaaggacggtaccactgaagagagagtgttccacccgcgccatatcatccaagcgaccggtcattccggaaagatgaagatgcctgaagtccccggcgtggacggcttccagggtgaccttctttgtcactcctcgcaattcccaggtgccaagagaaacagccaaggcaaaaaggctatcgttgtgggctcatgcaattccgcccacgatattgcacaagattatcaagagagaggctacgatatcactatggtccagagatccacaacctgcattatctcctcaactgccatcacaaagatcggtctgaagggcctttacgaagaggatggtcccgcattggcagatgccgatctccttctccatggcactcccacaccagttatgaaagcgcttcagatccatatcacttcccaagaagcagagcatgataaggagcttctcgaggggcttgaaaaggcaggattcaaggttgatcgtggtccaaatggcggcggactcttcgtcaaatatttccagcgcggtggcggctactatatcgacgtcggagcctcccaaatgatcgtggatggcaagatcaaggtgaagcaaggccaggagattgctgaaattctgcctcgaggcctcaaatttgccgatggcactgagctcgaagccgatgagattatcttcgctactggatacgacaatatgcgctcgcaaacaaggacgatgctgggcgacaaggtcgctgataaggtgtctgatgtttggggctacaataacgaaggagaaattaggaccatgtggcagaatagtgggcacccaggattctacttccatggaggcaatctggcgactgcaagatactattctaagattctggcactccagatcaaggctcttgaggaaggtatctataaccatggtgaattctaagcggacgggtacggatatattgtttcaacatcatctacaatttgtttttcctccaatgcttgttctctaactatatcaaattcatttatcaactccaagattgacttttccaatatttgaatgtatcagtactccgtacagcagggtgtaataccttgggcagcggggcagcgaaaccgaatcgccggtgcatctcggttctcgtactaggtgggtcaggacaatgagatgaatccacacccgtgcaaaggcatacgtatgtttttgcctaacatggaacgaagcattgcccataagaaatgatcaacgagcaaataaccacttctggccctgaagacttccatgatctgcatagtttgttgggatatccgattaaccagccacaatattgggaaaatagaacccaacaaccatacgagatcctgaaggatccacttgtatgggtcttcctgggcaaatattttccccatattggttgtctgtctactgtatcatgtgagattggtttgctgaatttctagcagactgctatatccatgcatactacgagctacaaacccaattcaggtctactacccatatcactcaaatgaagaccatgaaagtatcgaacgacgccaggaacaggtctctgcatctgtggttggacggggaacagacggaccccattgctttgcaggagaacagtggatctattagacctgtatcctccgatctgctcggagttgccgcctgaagggtccacgagtatgtatgaagtttcaatatccgtatcgttttgtttcctgaatctccttataatggacatctgctctcgcagcaaaagtcgctcgcaattgaacaccctggaggacgcggccagctacgcacacgctacgtaaccatctaaacctgtctgttcgctcacattcactcccctaatattcggcatactaactaaaagtcttcgttgaagttcaattgaacgctagctatgcctttcgaaactcaggagccctggaaaagacagttctacagtggtaccgaatgtcccgagcatgtagtcattccattgaaggactacaatgcgtaccgcctcaatccggtgcaccgatgggtgtacaataagctggaaatcgcagagaagcagggactggcgtgtgcaccacatggaatagctcctgagaaattccctgtcttcagcaagccgatttacaacatcaggaatcttggagcgggaaccagaattcttgaagacatggaagactaccgtgagcactgctcgtcgggacatatgtggtcagagcttcttgaaggtgaccacatcagcactgacgtggcggttctcaatggcaaagtagtctggctatcccacacgctgggcattccctctggcggcggcaccttcgacagatgggaagtcaatatcgctgtaccacagcaggacgagcgaacactcgtggattttatagagctacacttgccagactacacaggcatgctcaacgccgagatgattggtggaaagattatcgagatgcacctgcgcttcaccaaccaatggcccgacctctatccgcgcgggtttttggatgccgtggttgggttgtatcaagggaaatggtgtccaactgccgagatggcggtcaatgacactcgaggattcagcgttgtcttgtttggtaccccgaaatcagagtcgtgggtgaagcccgagatgtcgctagttgaggccctccgctctcgccactctttgtacagcgtgcagatgcccttcactgagggcattccggctcgtcaccactctcaccctccagggggttatcagcttgcaactttcaatgggcccgatctaattcagtgcctgaaggcgcgggaggacttcaagaagttatttagtgctgttaacagttggtctagcatcacagcaagccacgtctaggtctattccatagagtgccacttggatgcatcagcacatagcgtctgagaaaatatgttgtcgcaatacgtcacatctctacgattaagcctctgtaatctgaatcccgctgtccatttctagccaatggatttcaataatcaattttgaccaacccaatggccacgatgcgttcctctcacgccgttgattcttggagtcagaattttcatgatctactatagatcgctatcacatgcttcatgtttgcttgcttgctcatttgcagaaactccagcgataaaagcaagccatctcctacttctgtacttgcttattctttccgtctctatcttactcccatcttactctcatcttactctttctccacatcaacatccacgtcatcaacctacagcgtccacccggcaccatcgaaccggcaccgtccatctcccattttcgacatcgacaccgattccccaccatccatctccgcatccaatcctacgtacttgcttatggactatgggttccctctctgatatgtcgtcaggcagtctgggtcctcccgtatcggaagcgcaatttgatgcctacacagctgcccggcagaagatgttcgctaggctgcataactatcaatcgctgaatgacgatgacgatacggtccacttcctggggtcatcttactctcattctgaattgaattcactctttcttcaagggataaacctggcatgtcacaagaataataccagtgtcacctccgacctcgccgagtttgtacagtcttttgaatgggaaaaagtactcttcttcctggccttacagaatcaagtgtcgaggcagcaacaattccctaataataatgtagcttctagttagttagtgactgttcattactaactattactaactatgactcataatgcgaattgacatgtagttagttaaaggtcaatcgatttatcaccaaacactacgtgaagaagaatcatgtcgagagcaaccatgtccacaatcactctgcacagcttcgctgcctccccgtttggcgaaaaggtgcgccttatcctaggcttgaaaggtttggtatggcagtcagtggatgcggaactcattctaccaaagcctggcctcacagccttgacaggaggatatcgaaaaactccagtcctgcagatcggcgccgacatttactgcgattctcggctcatcgcggaagagttggaaacgcgatatcccattcccaccatctttcctggcaactccaaaggactgtgcttggcgttgtctagttggagtgacagagacttgcatattgctagctctggacttgtcatcggagtcaacaaatcaaaattcccacctgatttaatggccgatcgagagaagtttttcgaaggtttcatggacttgcaccgtcttgaagaggatgtgcctcacctcaagactcaattacgcgcacatgcaagtttgattgaggaacagcttagtgacagccgttcgttctggctgggtgaagcgccgagtcttgctgatttccatgcttacgttgacatttggacggcacgcgtttacttggattttgcacaagaactgttcaaaaatttccacaagatgtctctatgggaagagagagtacggaagattggccacggaagcaaccgggtcattgatattgcggaagcacacgagtcggctcgttgcagcacacctcttcccggtcacggcgtagattccgaggatgcacttggactttcgcgtggggatgatgtgatagttacgccagacgactacggacagggacataccactgggcgcctagtgactttgacaacgcgagaggttgcccttgtgcgtgatgatcctcttgtaggacaggtggtcgtacacttccctcgtattgggtttcgcatctcccgttcttcgaaaccctagctagggagcccttcatttatattagatctgtacttctccacacataagcacgatggaaagaggcaaagggaggtctgtcaacctgcattcaggcagccaaagtcttaatgcatcactattgtttacatatctccagtcttttatgttgtgctatttggaggctttggaaaaatcccggaacgatattcatatgagagatgtcaaagaaaaggcaactcaaaagacagctagacagatgtcgtatctttcatactagtacagatctagatctagattcatgtcatacaactcatttcatatagctcatgccatctcaatctgctcatcttcggcacccttcttcgtgactgtcacatcatcagagggaataacatatgtcgcccactgacgagcaggaaccttgtcctgaaagagtctctcgatttccgcattgctgcgacctgcagtctcaccaacacagaaccacgaatatgctagcaaagacgtggttgttgctccgtagacaaaaccgatcatcggacctaaatgacccgtgtagtacatataggggctggtgaagaccataacccagagcgtgaggaagaagacgcccatggcgcacgcggtgatcttgtttctgttgcggccaacggacatttccgatgcaatagtgtacgagagggtcccgatggagaagttgtagaagatgatgttgatgtaggcgagaacaacgatgccgatgccgatgccacggctgaaggttccatcggatgctttggtggtgccgaggccgccgacggcaattagggagatgaacataccccctgagcagacgaggaggttcgtgcggcggttgatcttgtttccgagaacgactgctaggccgacggtaatgatttgtaggacatagatgatggtgttgatggtgaaaggatctgaaacaccgatggactgggcgaacacaacgccataggtgtaccagaattgaataccattaatctgctgcacgaacatgacgccacaggcgtagaagagcttgcggcgctcaatgggatccatgatgagtgagacccaggtagcgtccttggccatttcacgctccatctgaacttggtcttcgatagcttgtatgtccgctgagggatcatagtcgcggcagctgtggttgattcggcggagagctttgatggctttctcacgcttgcctttgtacatgtaccacactggactctcaggtgtgaaaggaaggcacagaagcaagataccgggaagaacaaccagcaggcacatgggaatgcgataagattgagaactggaaatgctctgggtgccttggttgacacaggctccgactaactgcgagatagactgcatgaactggaagcacatgagggccggacctctgatggcagacggcgccacctctccaatgtacatcaggcaagtagcggtgaactgtccaatacctagaccaatcaacacacgactgacatagaagactgagtcagagccaaatgagcacacttgcacgatggctccaacaatgatacaaagagaagccgacaggaatacagcacgcctgccgaagaagtcattgatgggagcggcgccaatagctccaactaactctccgacatagatgatgctagcagacaccgagaggaacgatgtcccaagagagtatgacccatctgcatttctctccccgtagtccttggcaaaccatgtcataccctgaatcccagtatagtagatcgtatcgtaaccgtagcagagagcaccgatggcagccaccatacagtaagcgatggcccgccgattcgacttccagtcgatcttgagatcaagacctgccatgttcgaagatctacgtttttgaggtaaaaaacagtaaactcaatagacttagaagcccacagaggaaaaagagaatttcagaagaatcgaaccaaccggtttgcaggggaacgatcgtatatatacctttttttatagaggaaaagttcaattattgccagaccaaaccaagaacccggaggcccgcatgtcggggtaaactccatggggtatgcgggccatagccgagtattttcgaagtctccatctaataggacccctggggccccccttccccccggctgatatgtagaccaagacatattttatagtgtgggtctccgcgttattcacgcactcacaggagctttttacatgaagagttttaccccagacactttgaagaaagaggcagcttcactatttgtagatgtcttcgagcaaagatctcatgttggaagagggcagatcgggctataagccgacaagatagcagcagaatttcggcaagtggtcgccgccaagcggaatcccgaaacggggatgtcgccgaaatttgacgataatttcgccatgcggccagtcaaagtttcaagatttcaaaaaactaccgcggcacaagcctttgtcgaggaaactggagtaatcggggtaatcggtaaccttgaaagagaagggctaccgacaatctttatctagcgatataatccgctagactaatttaggtaagtctgccgctggccgcaattctagaggagcttatgaagattaatatggtactcttgatacatatcacatgacctggagccagttgaaaattgcggccagcggcaggtgtacctaaattagtttagcggggactgtgaagattgtcggtagctcttccctttcgggatttctaggcgggtctttccatactccaacatccggggtggactatagattcgcttgcaatagccataaaaccatttctatcggattataccgggtcagagaaactgtgattttatctttatattggctctatcggcaacactccggtatttctttggccaaggtttcgtgagtcaagattttagcacgagaggactaccgaaacttggccaaacgacaaatcgggaataacacggctcagctagaatcccgtgaatccaatagtgcaaattcgggaaagagaggcattcaatgtagccgataactaacaaggatgtactgctactctcataattagcctctaaataaaacatgatagcaagcccatcatgcaaagaatttcgaagtcagaggaagcacacaatagaaactagaaggggcccttttcacatgcatctcagctaccttcgttaacgtatcacgtagggcttgtcacgattggcacttgcgaaactcgtactttcccgttcgggattgtaccgttggtcgttccttcctgttcgagggaactcgtttgcgcagacagtcgtaccttccttctgggataaacgaggatagggctttgcccccgaaggggtataaagaccccattgttgtttaacgtttgttttcttttctttccttctacatacttgatattcgatgagcaatgcacttcttttgttagaaagaacctggcacgtcacagggcttggccaattgtattcagatgcatggtacccaaccccaactccaagtatgaaaagataataaggggatatatccacatcaggaatggatggaataagtcaatgaatgtctagaccgaaagatctgcgtaagggagccaacttcatctacagtcaatttgtgcggcggtgtttatttgtcagtgagaatctacttcataccccatatgacgtgacatattccaacgtatgaacctatagccattgccgttaaggccaacgcatcaagagtgtcgagtgaataccaagccctcaaatgtttcagcgggaatatcaaactccttccgttctaagtccgactaagtgcctgcgcgtggcaccccagaagacctccacttgccaagaataaaacctggttagtctggacgtgtagcttcttctgcgagttacattaactagcgagaaaatcggtgtcggcataggaattactcgattcggaacctatacggggtttgatatggagttgagccttgccctcacaacgactctacatgtatatcttccaatggacaggggttaatgctcagcatttactattgtcgaataaaattgtaagaaagacctgtactcaaagctgccatgcctgttgcagacctaggttatgtgggccgaatacagcagatgactccgagtgccagtgtacttagaaacccaatgattgttggcattctgcaaaacaattagtaggtttacaatctagacatagccatatcctaagcatggtgtttgagaaggaaaaggcttaaagaatgagagttgttagacaaaagagcctgtgtccttctctttaggccgttcttaaaaaccgaagttcgacggttgatagatctaactgaattagcagaagccctaggggtccactactgctaactgttcaagaattgctgcgaaggaaaatatgatgctggagacaaaaatggaaaaaaggggtattttactcagccaccctccgtattcaaaatgagccgaatgactccaaaaagtttagaggagacatccatattcccgaatcaagagaaaatgcggttgggacattagactatgaacaattcccataattcaagcagcaccagaggacactgagaatcattagtgttgctcgacaccaatattcctttctatatacacgtctcagtcaatgacacttttctcgtcagcccagctaggctgaatagaccggcaaacagcctcataatcctggaagcgctgggtatcctccaccagcccaggcgttgtccagaacatagcccagttactatcagccagcttccaagtacccgaagaccgctcgaagtaccatttattaaccgggttgtccatgcgactacgccagcagactccattggggaaacatgtgcgcaccatcgcgttgaacacaatgtcggcgacaccccccgcgccttggctgcgcttgagcacggcgaatttatccaaatagggcaccatgcgcgcggcactggcttcgcttccgtcgtctggtacgcccggcggcgtttcccaggtcaggattgcgccgccttcgtactcaccggcgacgatgataccggcgatacggctgttcactcggtcgaggtagttttggacgttgagtttgcggtcaaaggagtcttcgattagggtgactagacgggggagatcaatagaagggtcgttcaatcccagtcgcggttggatctgggctgtccaggggtgtgtgtaggggtttgggaggattgtgagaggcattccacgtttcacaaaggtcgtgtgggagctaactgggttaaatgggctggatccgccattggaagcaccgcgtcgacctgggggtagggaggatgatagtagaggcttgtcggtgaggaggtggtggattaatgggttgcgctgtcgacgggttccaaccgctgacgggtctgaagcggcctcttttggtgaacgcgctgagtaagaaacttcttgtggggaggtaatgatgcctgaagaggcggacggtagcatggctaatgcttgttgggttaatctgagattctccaaatggccatctagcacctcctccatcgcctcggcagctggtgattgagcgggtgcggtaggtggcataggcgagacaacctcgcgattgacgaattttgagaacgggttactctccaagactgggtaagtggcttccgtagttacctgtttcgagggatctttgtggccagaaatagagtttcgtgcctgggaaagctcatcttcaatttgatcaaactcttgctccatgttgatgaagacgtgcgatgattgagggcccttgaaagctgggatgcccccaagcgcatcgagaacaatgacacggtccagagagacctccctttgtagagtattgattctctcggcagttactgctggatcttcgtccgggtctggatttgttgacagtcccgcaaattctttcgtcagtgcaagggtagcatcatcagctgaaactgtcacggctcgtgggttttcctccgtataggcaatgggcggaacaagtacgacatggccatcccgaaggacgctcaagagcatttttcgcgacaacaccgtgggttgaccagatccccgctcggatatagataacgccgagtctagtctgaaagattttgagtccggctgctcatcgattgcccccgatatccgatttgcctgttcaatggatatttgtcgcccggcagggccgcccatcttcccggggtcgacaactacacagcatgccatgcccaggcggacgagctgcgagagggtcttcgccactcccttaatgacagaatcatcgagcaattgtggagtggtgattttgatcagggccaagtgcagcctttcaggtataacctgcgcgcgcggagtaggagttgtatcttgccggaagacagggctatcgtacaccgccctagaagcaccgtagaatgagcccaaattgacaccggagggcagagatcctggtatcggctccttcggaggctcggtagattcttggctcgatttggcggggctggcctttagccgagctaagtacgacctagcttcacgcttagtcgatgcggagctcaggaggctaagaaagaattcctaagccgaacatgccgctgttagcatatgaacagaaagaaaagaagaatagtaatatgccacctacccgatcaagcaatttctcctttgcgcggtggccgaggcgatcttggctttcgctgctacccgagaactcggcgaattgctgggctcggacattcagcgcctgtgccggtcgcgccgtaatggggtcactaggacgaacgagatgttgctgcagacttctagtcaataaatgcttagcattggcggggtataccggttttaattaccttcaccagtgaggacttggccgttcgagaccagttgaacgttcgggaggtcattgttgggtgtatatagttgacgccaatgcaagagcatcggagaaacaacctcaccacaaatcaacagtaaacatataatataggggaacgagtcaagatcaaacaaatctttctgagggaaaagaaaataatatgacgcatcctcggctaggtatagctcaccgcctgtggataccgagattgataagaaaggctgtccacttctgtccacttcagggctataaattgtacatgtctgttctgtacactccatacaaggatattagtggactaggacttaacggaaatagactgcgttttaaatgcagctacctatcctggtacagagtgtataagaaaatctacccactttcgagaaatatataatcaaccataacagctggtggttataaatagcaaaatgatgttacatgttgtacatacagtccaacccttcttaggtttaggtctcttcaagcataaaataaacacaaagatcaaagaaaggaattgaacttttttatactgcctaacaataaatttagaaagaaatacaacctattcgaatcacccacgtcattttcgggaccaaaatgctcgctgatttcgtatagtacttttgatatagctagcactagagtccaccggtgtactatccactcctctatgacctacatataccctaaagggaaccttggaagtatagtcagggtcaagggttctagaagccagtagcccgttttatacgtgtagaccgctttgggcaaaatgtaacagtacgagggggatacatcgtaatctatggcgaatccggcctggaacggggtactgaaaggttcctatactttagcggttgaacctcccccgccactgcaaaagttgctcatcctcgtcatctaaaaaaaagaatacctgcttgaaacacgcctctgaaccaccgaagactcatcaaatattgtcaaatatcaaatccaagtaagtgcgcccgctcctctctcctccccctcttcaaatccaaccccggtcgcaacacccctccttgcaatacagcgcaaatccctatgaattgcccaacatcccctaaggattgctcggaatcactaggaacaatagctgtcaatttactgtggtaattggcactgtctgtttcgactattggtcctatttacctgcttgagattgatccccaccattttagatttacagccctcgtacgccaccacgccgcttacccttcctgcaatccaattgatcgtggcaccctagcctggtctcaccgtcggaaattttgatcccaaccgcctcgaccctcgataccccagtcaagttctttatcctcactatgtccgatcagagcgaatacctctccgactccatgtccggccaggacaacgggctcaggccgttgtctaatgcggacgacttgtctctcggaaaccctaacagcgatttggctcgtatcatgagccgtgctggcattcaattagccaatggatttccagtcgatgacgacgaggacgacgacgaggacgagctggatgaggactattctgccgttgatcaggatgacgacgcaaacgatttcccatactggttccgccgcccaccctcccacaaccgcacaaagctggatgagctgcatccttttgttcaattgctctccatatctaatgtggaagattgtgtgaaagtggaggaagctttccccgagcaggagcgttgctctcccgataaggtatggctacccggattcaattacaccatagagcatcaattcaacattcaaatcatctcacttgatatgaattgatgcgacttcagacggatggagacttcattgctaataatttcatagttccgctaccgtctcagcagatgccccgagctcagcctgggcctcttcactcttcctttgctcgcagaaggagaaacaaaacctcgcccaacgctcgtcggacacatcattgccactcgcacttcagagcccattgtgacagatcggtcgatgcaacttccgaccaactggaaaaacgagcgttggtccattgaggacggacaagctgttggtcacgaagaaggcggtcgcactattgccattcattcgcttgctgtggacccaaagcatcagggcaagcaggtcggaagcacattgatgaagtcatatatccaccgtattagagaggcccagattgctgatcgcatcgcgatcattgtacacgatcacctgatccccttctacgagtcatttggcttcgagtcccatggccctagcaagtgccagttcggtgggggtaattgggtcgatatggtatgttctctttttaactgtcagcaaatatatactgaccctaaatagatcttggagtttggccccgagcctcttgaggagtaggaagtttttcgtgtcgttttttttaaccctctttatttaccctcttctttttctatcttttcggcttggggcatgttaaccactgacgggttcaacccgttcttattacacacatccatgtttttgtctcatctcaagggtttatcctagacgggctttcacaagaaaagcaacggagtttctttgggcgggattacttttatgaatctgggcagaaacggcttgggcttcccgaatcggtcacaagggcatgtgtaccatagttgacgacaatgctattatgaggatgattgtttgattccggccagagatagttatcaacttccaaatatcctatatataaatcctcgaggcatgaaatcgagccctcgatcattttgttccatattgtatcacgtgactcggctatatcccggttcgtccaatcctggtccccgcatttgccttccgcccggcagaaaaaaaggactgccaacaattttttcatggagaaaaacccactctatcaacacccattcactcacggcattacttcaagagtcattatttaatttgactcctgacttgtgcccattatgaagacgacgtggaaggatgtgagtcaatttcccgactgcccttttgcgctagatttgactgagcagagtgctaatgtatttttcaccgcttggtagattgcgcctgtgccgacacaccaggaattcttggatattgtcttgagtcgcactcagagacagcttcccacacagattcgtgctggtttcaagatcagccgtatcagaggtatgatcacattcttttcatctgatccaacatcggcaaaaaaaagttatcgcggttatcgataaagcacaatttctgatcgaattttctttccatcagggttctacaccagaaaggtcaaatatacacaggagactttcggtgaaaagttccagcacatcctcgatggatttcctcgtctgcaggatatccatcctttccgtaagttttactcctatggcgattatggttgctcgggtggggtctaatatccaccagacaaggatttgatgaacactctttatgatgccgaccacttccgtatcgcccttggtcaagtctcgaccgccaagcacctgattgaaaccgtttctcgcgattacgtccgtctcatcaagtatgcacagtctttgttccagtgcaagcagctcaagcgcgctgcactcggtcgcatggcaaccatcacccgccgtctgaaggaccctctcgtctacctggagcaggtccgccagcacttgggtcgtctgccctcgatcgaccccaacactcgtactcttttgatctgtggataccccaacgtcggaaagtcaagcttcctgcgcaatattacccgcgcagacgttgatgttcagccctacgctttcactactaagagtttgttcgttggccatttcgattacaaatacctccgtttccaggccattgatacccccggaattctggaccaccctctggaggagatgaacaccattgaaatgcaatcgatcaccgctgttgctcacttgcggtccgctatcctctacttcatggatctttccgagcagtgtggatattccgtcggcgatcagatcaagcttttccacagcatcaagcccttgtttgccaacaaaattgtgtttattgtcgttaacaagattgatgtgcgtcgtcccgaggacctggagcctgagtaccaggagcagctgcaagagatcctcaaggcagaggatgtcgagatgctgcaggtttcctgcaccaccaccgaaggtgtcaccgccgtcaagaacgctgcctgcgacaagctccttgctgagcgagtctcccagaagctcaagtccggctccaccgctgccacccccggcagccgtctcggcgacgttttgtcccgtatccacgtggctcagcccatgggtggtctgcgtgagaccttcattcccgaggccgtcaaggacctcaagaagtacgacaagaacgaccccaaccgccggagactggaacgcgatatcgaagaggagaacggcggtgccggtgtctacaacttcgacatgcagcgcgactacactcttggcaacgatgagtggaaccacgataagattcccgaggtgtggaagggcaagaacatctacgactttgtggatccggatatcgagagcaagctcgccgccctcgaggaggaagaggagaagctcgaggccgatggctattacgagtccgacgagagcgtggaagacgtcgaagacgccgacaaccgcttgaaggccgatctcatccgcgagaagcgcgtgctgatgcgcaacgaagccaagatgcgcaagtcgctgaagaaccgcgccgccatcccccgcagcgcaaagtccaagaagctgtccgagatgaccagggggctggactccgctggctacgacaatgccgcagctgggtctcgtgcccgtgccgccaaccagcctcgcggccgtgcgtctgtccgtgagcctactgcggaccccgatgccatggacgtcgacgacaacccacacaaggcccttgctcgcgctaagagccgtgcccgcagcacacctgcaactgatcgtcgtctcgacggtgtcaccaccttcaccaaccgtgataaggctgagcgtatggccaagttgggccagaagaagatgaaccgtatggctcgtgctggtgaggctgatcgtcacacaaccgcctctcttgacaagcacttggtatgtttttctatactatcctttttttcgggtttatttgctaactattctctcttcagtacgccggaaagcgtggtatgggcaagacagatcgtcgttagaagccccgctgatgccgatgcggcttcaacgagacccattcttaatcattgtccattggtttcgatgccgggtgcaaaatggtgttgggcgtttaatatttcaaattttttttcccctccgagtttcgtccaaatgttcatttgacgcgcatttttggtttccacgactgtttactgtggatgatttatgtttatttgacacagtaatgatttgtgggagttcgttctcctggtcaataggacgaaaaagttctataacttgatgatcttgcatataccgccaatacagatgatctttggtttcatgtggtacaacacttagactccaatcctagtgtctacatttttaatcagcctttctcgtacggacttataccccaatgtgtaactaagatcacccttgggtagagacagttcgccggtgcttagctagttacatagagcagctggttacgtcctcagaagcattggtccctaggtgcattaaccggtgggctgaaaggctgaaaggctgaaaggttattaatagcaatgttcaccaatcatacgattcttcctatggttgtgatcatttgataaggtagcctagcatttatgtagcacaacttagaaagaaaaataatgttaaggaaagcccgaaagtagtgaaggcacagttgaatcaaactttaagcatgcaacaagcataatgcttattagagggttaatatccattgacatatggggcccccactcttctaggtctagatacatagcatgatagctcgggtgacttttgcaagttgcaagttctctgacaatatcatggtagaacagaacagagcagatcctatgtagtatatggcgaggttaacagcccacccttggatgtccgcaactaaccgagcaccgggttataaacaatgacggcatcggacatgtgctaaactgaacaagatgccttcctgtcataaaggatcggagataagcattgtcgcctgtgcaatggggtagttgcttttcatggggagaggcgggggtggcttatttgggttgtatggcatgctatacagaagtacaacatatacggaatactccgttatagttatattgtatatagtgtagacgtcattatggttgtgtctcagaagattagacaaggctgaccaatatttgttcattgaacttgatttatccaaatgttcctaatatggcatggggtaaagatctactgtcaggcaaactctaaatccttgccctaggttgttaaatcaaacagcattaggtataatatactcagtaagatgatttgttgtgtttagataaagaccccagaatacttcaactcactatatgttcattatgccacgtataacatacacaaagcctgcggggctggtcaggtttgccccggaaatcggtccaatctagggttacatgcgaaaaagtcagctcacacagacataaggctggattgagtttatttcctagtcggagactaactaaaggaggtttagggtgtccacaaagtttttttctgttttcacaatggcctgataccggtcagagtttttttctaggggattttcattttaggtctaggccgaacaagggatgccgcgaaagacgatgacgaacataccgaaaggcgaatatcatagggaaaacggaatcatgctacggactacggagtactccgtagggctttaagtattgtattcatgaagatccatgaagtatctataatgttccaatccatatatatggtacatatcttttggtacacggtacatgtgtgttttcggctatgccgactcgggattccactcggctcggcagagaaaggacattcggtgtgccgattgagaagaagtggatacaagatcaacacagcggaaacatctcataggagtcggctcggccgaagccttaacggtagtggttttataggtagtcttttccgtgcccagcttggatttcgtcttattagcatgtttcgattcactaggatttgttcagggatacataagtaatgggactatctatctttgtgtgtagagcatctttgtttttcgtttgactttcctaattgagctatcaaatgcaatcagatattctagagctctcaattttaactatgatcagcgcccctatgcccggctagggagcagagtctacgtattatgacccactcgtaccttggtattactatttctttcttgtttgtttttttcggttttcgccttctcttttagggaatctatccggtttcagtcgcctttgtttccgtctatctatcatgccagcacagtttctaatctatccataccccggtcgtagaccctgtgaacacggcactagaacccgaggtgaaggcgaccacctggacatatacgtcactctaatagaagtgagttattatttttacattgtcgccaggaactagaaccagaaccagaagtatcatggtcactcttacgtatcgatatctggcactcggcctaggcaccgcattctcattcgcgcatttgcaccgaggacccagtatacctgactgaatcccgtatgtttctagaaggtggtgagaaggtcgggtgatcttttagtttttatgctcacacgttactgtttattgtttgatgtaagtgtttacattgtatggcctgtctgttccaaggttgcatagcctctgactatatcatgaatgcaatcaatttttagaacaaagtcatacaacatctacatgaatacgttttcagctcacgtgcattccaggtaccctaacattcccccgtcctccaccttctccaccataagaaaaaagaggaacctaaacccggagtatatggcgctagacattgaaaaggccaagaccttttagacccatggagtaaaattcataaccttataaaccccatttcacccatctcatgttcaaaaaactcattggacagtacaaactaagatccgcgcgcccccgtcttttgccggtcatagtactctacacatacggagtacccacggtaaccccaagggaaagggccacccccaagacttcccccagaaactatttagtgcctcctcttcctttctcttcgcctttttcctcttcagcttctttctatcatccccgtctgtctgttcatcatgggtgtctctaccttcatggataagatcaagcatgggaaggccgaatcccaggtctcctcccaggccagtcctgctcgtgccgactcgaccactgctgagaaggacaacctcaccctcgatgatagccccgtcaagtacctgacctggcggtctttcatcctcggtctgtgtgtctccatgggtggtttcattttcggatattctactggtaagtgtcacacagccctcaccactgtggatgcaacgttaataatagccgaacctcaggtcaaatctcgggtttcacgaccatgatcgatttcaaacagcgcttcgccgagtacaatgccgccactggagaatatgctttcagtaacgttcgcaacggtctgatcgtcggcctggtacgttcgagatgtcaatggattcccgcatgcaagtcttactcatactaactctatactagctctctatcggaactatgattggtgccctggtagctgctcccattgcagaccgcattggccgcaagtactccatctccttctgggccctcgtccacatcgtcggtatcattgtgcagattgccaccattgataaatggtaccaaatcgctcttggccgttgggttgctggtctaggtgtcggtgcgctttccagtgtcgtccccatgtaccagtctgagtctgcccctcgccaggtccgtggtgcgatggtcagtgctttccagctgttcgttgccttcggtatcttcatctcctacattgtcaacttcggcaccgagaccctcaagagcgacgcctcatggcgcatcaccatgggcattggcttcgcctggcccttgattcttgccatcggtaccctcttcttgcctgagtctcctcgttacgcctatggccacggtcgtgtcgaagaggcccgcgatgttatgtgcaagctctacggtgtcccccacaaccaccgtgtcgttgcccaggagatggccgatatgaagctaaagcatgaggaggagcttgcccacggcaaggctcactggcaagaggtcttcactggtccccgcatgatgcaccgtatcttgctcggtgttggtctgcagtctctgcaacagttgaccggtgccaacttcatcttctactatggaaccagtatcttccagggtattggtctgagcaactcttacgtcacctccatcattctcggtgccgtcaacttcggtatgaccctgcccggtctgtacatcgtcgaacactatggtcgccgcaagtgtctgatgtacggtgcggcttggatgtttgtctgtttcatgatctgggcctccgtcggccacgagatcctggtccaaaccccctcctcccaccccgccggtgttgccatgattgtcttcacctgcttcttcattgtgggcttcgccaccacctggggtcctatcgtttgggctatctgtggtgaaatgtaccccttcaagtaccgcgccgtctgcatgggtattgctaccgctgccaactggacctggaatttcttgatctccttcttcaccccgttcatctccaacactatcgacttccgctatggctacgtcttcgccgcctgctgcttcttagcggttatcgttgtcttccttttcgtcaatgagacccagggccggactctcgaagaggtcgacaccatgtacatcctccacgtcaagccctggaagtccgctggctgggttccccccgagggcatcgttgccgacctgcacggaccttctaccgaggcccccaaggacggtgaggccggtactagtgagcaccagcatcacgacggcgagcctcaggaggttgctgagaaataatgcgataatggctgaaatgatagcgtgtatcgcgcggcgcttgcgtggatgctttttcacaaaattctgtgttcatacttaactctactccgggatcatttgagtctccaccatattcctagggagaccatgatttaatagctacaagccaggcttgttttagcaatctcattttcttatcaaattaattcaaatcagctgtaagacacgcaactagatctaattctcacattaacttcattgattcccgaattccatcccagctccctttctagccgccccgtaaacagcagcaacatctcccttgtcccccctaacctccttaacgacctctagaagcccatccataacctcgacgtttttcatcctcagtcctccctccttcgcaatcccataagcatgtctcagatccttcctagcaagatcaactgcaaagagcggctcgtcccgggtacaataatccccgcccaccatcctctgcgcataattagcaaacgggcccggcgcaaaaagcccaagccattcttgcagcggctcaactcccagcccagacgcctcagcggcaacaagggcctcagcaagaacaccaaccgtattgagaatgaacgtgttaccgagtaatttcagcgtcgacgcccgtccaacatctatatcacctcccctcccagacgaaagatcaatcgtcttcttagacacgacaccgtcgaaaaacggtcgcactttctcaattgccgcacgcttcccagccggaacgacgataagctgtcccgcatctgccatattcggtgccccgaagaccggacacgcgacgaaccccgctccccgctcattgaaggcggcctcggtttgtcgcgatgtatccgggtgcacggtcgagcagtcgatgaagatcttgtcggacaggtcttgcgggattgtagggtccgataggattgccgtgacgattgagtccagggcggcgtcgtcgccgacgcaggtgaagatcaggtcggattggtttactgcttccgggagggtagttacggctttggcgtttgggagtttcgaggcgtgggcggttgctcgtgcggttgtgcggttgtagaggaggagggggccggtttggggtcctttttcggcgatgttttggctcatgccctgcgattgcggattagatgaggttgctttttggttgcggtgcggattggcttactcggccgatgttgccgagacctatccatgcgactcgaggccctgccattattgcgtagtaggtatagatggatgtgtatagaaagactgtaagtgtaagagtgttcggggtgttcggggaagtatcggggccttatacgggtgggatgtggggtgtggggtaaagtggctcatggctcagttcttagccgattgtcgggcgacaatatatacgaagtatccagtaggctaaagggttgattgcatggtaattcgccatggcttgcctgtacttattcctccatgttcgaatactgcattcgcttttcaagggttcagttgtgacatacaaaaacgtgtaatgtggccaagagctgccctagaaaaacagattgagaaaagcatatagaattagagaaaaatcgatacgactcgatattcgcaaaacataatatccaacctaaagcctcgacttctcagcaatcgcaatatcctgaaacggcaacccgagatacatccacatgaaggcaaacctatatcaatcagcatcccatacatcgcataaagaccatataaaacctaccgatcactaccaaaaaacggctcctcttttccttcggaatttcgcacccaaaaccacggggcgccataagcccccttatcaagagcaatctgcgtattagccgtcaaagcctgcttgatctccgggcttgatgccgcagccagaatctccctgacttccgaatcagagtacccattgctctggagtagctcggttaggttttctggcttgctgatgtcgatacccttgtagtacatccactcccacagcgacaggaaggttgtttcgtacttctcgcgtgggaagtggttttttatgtagatcatgcatcgttggggctggctggttagtggctgagaacatttcgaagatatagagaggattatataccaggattgacaggattgggaagaactctggtgtttggatctgcggaactccaaagtatttacatgctcgctccgagtcgaatttggaatacgttgctttggcggggagtgaccaggggggtttattccctattcaaagtgtcagtaaccctggtctgaatattaatcacgaatgaaattctcgatctatactgcgtacctgagccaacattgatcccgcctagaaagcccgggtggaatctgttccatcaacacacatacatccaatgtattaactagggatttgcatactcaacctcaaccccatgtgactctagaaccttacggttccttcgtagataaagcgtcgcatagtatgagtatggcgatactgtccaagcggcaataaacaattaggaatgaaatctcagggggtggagctgaaggcgtaccgcagtcaatgtaggcatcaatcttgccagacatgagtaattatagtcgatatgtttctattcaatctcagtataatcaatcaggctaccaacgaagaggagttgattatagcgtggaggtcggggccgaggtggagatggaccgaggctgcccgacgatgatgaggtgatcatcttatttcccaaattgtcatgaatcgtcaagttctatattgaattaaatccaagatatataattgccatatagattttattcttttctcaagatactgagattggggccgccccaatcaccattgcgttggtttggtggattttcagctcttcctttgactgctcgacagccaaaagcaaacgcgtggagcgaatgtgaagttctatcaagtcaatacaggatcctctcaattggaccatgaactgaccttgcaaaataacctcatatccatcccaagagtgatcatcccgatcatcttcatgtatgagcactggaaaagatggatcccacgcctttggccgcacgcgcattttcaacccaacggtcttgctcatatccacccacagtatatcgtcagaagacattcgctctttttcaaagccaccttccccgtcggtctcggtagttttcttcgttctcctactttggccacgcaaccactctctccataaccgaataataccatcctcaatagtcgatgcactcaacagcaacgacgttcctggcttgacttgcactagattgaccaccacacataactgtgagaaattctcatatccacctaaagtgatctcacgtatcactgcatcctctgccttgtcttctcgacctccatatcagcccatgtaaaccccaccatatccaacagcagaagcacctacctgtggaaaaaccggacttcgaaccatttatgcttcgttctttttcttctttatcgctgcttacctctgggcgaaagcgcgagtatagccccgtcactctgcctggctggtgggtggcatcatgaccctcgctcagtccattcgtaccaaggtattgacagaagacgtggggctcggtgagttttgagctaggatggaagcattccagcagcagtttgaattccttgagtggtatgctaaggagcaggcggtagtgcaggattcttgaaaccagcgcatagaatcggtggttgactgatatgagtgggagaagtgcccgtgttgagaagtcggataggatttggatgaatacctagatatctctttaggaccgtatctcagagtatgttctgtgtacatacttcgttgggcagcgagtccaaggtcatcacgggtttagcggggttcatagtggttgattattgtgtcaattgagatgcaacctgggaagatagaccaatttatgctagttgtatactccaaggtgtaatacaacagaacagagacaacaagtgtatgtgagttgcactattgctgttggtcttgctgtacatcgacatagagacgataagggataagggataagtgacgtcatatcacgggaggcgggcatgaatttccttttccggctttttggtgtgccagtccactacagtccactaccgtccactgctaacccactgctaacccacatacaagcatcctatgtgggacacgacccggggattgtgatcttcacggttagttgcggtaccaaattgcctctttcggctcaatttgggtcaaacagtccccccgaacgtgcctggttccccgaaaactggggggatcccgatttctgtacgggtcaccgaggaaaaatgatgccaaggcgttgtatgctagtatatattgtttctaaaacttcgcgataccattagcacattaggcgagatccacgtgtggcctcctatacacaatacttggcctaacacattcattcctactccggacaccccgcctcctcattagaagtccaaccccgaccctttcaactgttttcgggcatttctctttccttttagtttcttcttctctcccctccaatattcttgttttcaacctacaaccatggacaacgtactcaacgacatctcccaccggagatataaccccctccgtggctcctctatcctggtctccccacaccgaaccaagcgtccctggcagtgagtattgttttcagaaagcgacatttcccaacaaatcagctaatcgtacaacaatccagaggagcacaggagagcccctccaagactaccctacctagttacgaccccaaatgctacctctgtcccgggaatgagcgcgcccagggcgataccaaccccaattatgagagcactttcgtattcgtgaacgactacagcgcagtgaaggaagaacaagcggcctataatccctcaaaccaggatggtacgcccaaccgcccagcgcatccgtaccacacgtatcaagctcacaaaccacagaactcgaatcgcgatttctcaaagccgagcccgtaaccggcaagtgctacgtgctcactttctcatccgcgcacaacctcaccctcgccgacctggcgcctcgagagatcatgcctgtgatcaacgcctggacagagatctacgcagcacacctgtccccggcctcgccgttagcgaagaacgcacccgtaacaacgctaccgcccacatccaccttaacaagcgcgacgaagccaaaggagcagtaccggtacatgcaaatcttcgaaaataagggcgaggcgatggggtgctcgaacccgcacccacatgggcaagtctggacaaccagctcaatgccggaagagcccgccgccgaaatgaatcagatgattaagtaccgccagcaacacggcggtagccacctgctggaggactatgcggcgctggagagccgcaaacaggagcgcgttgtgtttgagaacgaggcatttatagttgtctgtccatggtgggcgacgtggccgtttgagacgatgattatcagtcgcacgcacaaacgcgcactagtggatttgtccgaggccgataagatgctgcttgctgaggcgatcgccgagactacccgtcgctatgataatctcttcgagacgcacttcccttacagtatgggtattcaccaggctccgcttgatggtaccgaggaggagattgagacatcctacctgcacttgcatttctatccgcccctgctacgaagcgctaccgtgcgcaagttcttggttggctatgagcttatggcggagcctcaacgtgatattactcctgagcaagctgctgataagctgcgggcttgcagcggtgagttgtacaggaagaagatcgattcgtgaatgtctctgaattgaaaaagaaaaaaaaatgatgaattctggacgggtcataccagagttaaacctatttcatcctatatctatatgcaaattatattattttacccgccaaggcttttgtgccggatgtaagttatgttatacatagttgtggtccaacttgcaatgctcgttcctgtatagctatcggttccgtgttgcattgcattgaaccatcccctgaagccggatcatcccctcttccaaatcaggcacttaacccaggtacgctccgcgctgggtgaacatccaagccagcgaacccgacgcaacaatcaaaggattcaagaaccggcccttgagcgaggcattgccgaggacgagctcgccaacaaagtgagacagcgcaatgccgtacgtccacatgccaaggttgtacgcgacagggttcgtgatgttgtaagcagcagtcatacgaatgactgcagagaggaaggtccaggttccgaagatgcggccggagagcggagttgcgggaaccgtgccattgctgtagagtagagaggtgtaattcggtgcaatgtaggcttgcaggctgttaagagcggaaacgaccgagacctgtatagagagtggtggttagattgggggaatagaggcatcggtagctaggggttcggagtggcagtggtaatggggactggggtggacacgggtagaacttacgaaaaagagccatttgggcaggaggccctcggactgaggcagataggctaagtattggtccatttctgagcgtgagtttgtctttttgtttggtttgaagggagttggttgtttttcttgtgactcgaggagacgccgaggatgttccgggagtcttggcgtggatattcccaacaagcctcgcattagtttgctcaactttttctttttcttctgtcaactttttgctattcacatatcttcgctcattatggatatctcgaagcatattgaatgcctgtctcaatggccagcccatattgccccgggcttacctacttatggagcgctgtttctcctagcgactggtggactggtcattgcctgcaaggtctggacgttcgtgcgggtgcttctcagcctattcgtgcttccgggtaaaccggtatgaaatttgatattcagatcctgaaattaacgggatgaagctgactaggatgatcaaatagcttcgttcgttcggtccccccggtagctgggccgtggtgacaggcgcctcagacggcctgggcaaggaattcgcgctgcaattggccaagtcgaaattcaacgttgtgctcgtatcccgaacagcctcgaagctggcaaccctgtcagaggatatcagcaagcagttcccgcaggtgcagaccaagacactcgccatggatttctcacgcaacgccgatgccgactaccaggcgctgggcgaacttgtctccgatctggatgtgtccgtgctagtcaacaacgtcggcttgagccattctatccccgttccgttcgcccagacccccgccgcagagatggccgatatcgtgaccatcaactgcaccggcacgctgcgcgtcactcaacttgtcgttccgggcatgatacagcgccgccgcggtcttattctgactatgggctctttcggtggtctcctacctactccgttcctcgccacttactccggtagcaaggctttccttcagcactggtctactgctcttggcggcgagttggccccctacggaattgatgtggagcttgtccaggcctacctgattacctctgccatgtccaagatccgtcgtgcttcagcttctatccctacccctcgtgctttcgttcgctccgttctgtcgaagattggtcgtagtggtggttcgcctacctacgcttatagctcgtcaccatactggagccatggtattatggcctggttcctgacttgtgtttctgggactatgggcaagcttgttctcgggcagaacaagtctatgcacgagagcattcgcaagcgcgctctccgcaaggctgagcgtgagaatgctaagaagagcacttgagttgcttggcttggtttgctcgatttgctgttgttgtggagtataaggagcatactacgagtgatgcttcccttctcgggcgtgattaatttattattcgaaatgcatgatgggttcgacgaagtgtataaacagaaaaatgataatcagcgctcatgtgaaatttattgatacctaacggtcatcgtatcctataccaagaaaatgaaagctaaactccgtccccgatgatatcgtagaattcttatcgataagctcttatcaccccgtggacaatcatccatgacgaccagctagaaactgcgcatgttacaatcaaactaacctgacgcatataagtttatatccagactcatcatgtctcaatcaacccacttcattagtggcatcgaagacgcctcatacaaaaatcccacggaattaaaaacaccgatctgtgacaatcgcattcatctcctccttgccgcaaccggctcagtcgcgactatcaaaatagccaatatcatcagcgccctttccccgcatatccacaagctctcaataagagtaatcctcaccaccaaagccaagcaattcctcgccggccagtccgccgagcagcccaccgcctcgtccctcatttttctccctggcgtggaagccgtgtacgatgatgacgctgagtggggaccagagccctggcgccgaggcgttgatatcttgcacatatctctccgacgctgggcagatatccttgtcattgctcctctttccgcaaacacactagctaagctcgccaacggactaagcgataacctgttgacatcggtatgtcgggcgtgggataccgatggccaggttgacgggaaacgaaagcgaatagtagttgcgccggccatgaatacggctatgtggcggcacccagtgacggcccagcatatcggggtgctagaggaggagtggggggttaataaagacgagggcaggggagaggaaacaggttggttcgaggttcttcacccgcagtcgtcgaaggtcttagcttgtggggatgtggggagtggtgcgatgttggaatggactgagatagtgaaggttattgaagataggttagggttgggggatcagaactcatctcagagtagttaggatatgtctttgccattcctctatattcgcatttatcctccaggtagcatacttccggcgtagcggacattcccaagtcatcttcttggattatttatggcatctattagaatttttccacaccaagaaacctatatcagtaactttctctgacatcctcgataatctatcgtgggtttactccaatgatgttgggcatcagttcttatgcttggatgtatttttctagctcccgatgttcactgtttgccccctatgctcgtttagaatcttgcacaagacttcttgatcactttcccctttcaaatccaattgaacccactgtgtaaatttcacttgtgtcggctttacaatatcgtgaaaagagtggggtcccatctcacaaccaggtgagtgaaccaattctgagagctggaccatatattgaccccaaataggcgattgattggcgagttgtaagagaacatgcaaattggactgtataaggcggttaaagtcgggtatcagaaggtttgattgagattcgtgggagcccaatagataatgaggaagagagctgattaaaacataatcacgatggtgttttccgtcttggtgtcctgcttcctctcgatgtttttggtcccttggttggcttgtgatctcgcccttgctgtctgtataggccttgatcgccgatggtggcggaactgctggcaaccccactagttctgcggtatacacgatgataaacggaagaaaaaagtcactgaatgcatctccggttttagggagctcatatataggtgtgcagatacgtaagcgccgtcgatagtgatactggtaatgcaaagcaagtccacgccattcatcaaagtcatttagacaaggcgcagggttatccgataggagctgcgatggccgacacccattggagcataatgactcgaatgttcttgcttgattgacttcattaatgacaatctcgatattctggctgtctgttagatagacctttgctaacattcttagagctctggataacataccaatggacgaaatcccccccccccaataacagctagcagcgtttactccccagagcgccgaagagattccggcgtctcctaatagttccacaagccttgcaatgtcatctatgcccgggccttgcacggatgtaaggaaatcattctcgagagtcatgatcgggcctttcaaacgtggcaacgtggcaagggggcgccagattgtacgggtgcgaaggtgcagaggtcggattattgaatgagaatgtaatatattgtcgttgaatatttcagactgctttcgacaccgctctatgataatgtaccctaaatgatactagttacatggttacagtcggaccgcaaaagtctccactaggatagaaggatgattacggagtactacggtctgtattgtccctatggttgttggctgacccccctgagtggttatactgtatgctcaatggtaactctatagtatttgaactaggatttttttcaagtacaaaagccacataatagtagtatcaaaatccttcaaaaatgtagtataaaagacaccgaaaaagacatacataatagtaatgaaagagaataaaccaaattgattcagtcagtaacagcacgttctataaaccctgcagttccttcggttgcaaacagatctaaagcaatacatccactatcaatcatgggccatgaccaggtccttttgtcctattacattaccatttgcaaatgcactgaaatgtatcacccgatcggtcattgacacagatgcctggatcaaaagctccaagtaatagacggtatgtccggcgatggttcggtgaggaaacgaggcaaagtcaaggtgatcgaagtgacattgaatataatcgatgcaatgggcatctataatgaacttctctcagcattcccaatcactgcttataaagatatgcatatgttttgtggttgaaaacattggacttaccggagttttcaaaccgctctggtgcatctgagagattggactcataaatctccacgggtttggtaagaagatcatgctcccaatgaagtacctggatgctatgggtggactgaaatccctttgggtagttctggtccttttttttggaaacgatctgtcagatcgtacagggtggttgcggacacttggataatacacaccttgcgtaacacccaacaggggagcaaattcaccgatagtgcgctaggcccatatcccaggaattgcggttcattggggtgggagaaactttgaaacgatgcgaggccgtaatttcgccagcacttgtaggtcggaagagagtagccccgaaggccttggactgctgccccacgagcgatagcctcctccctttgatatacatgttagacttctcgctaactttgtagcatccaaaagatattttcgctcacgggttctcaggaataagcacggaaatgccgatgcgattgagggcagatcctaggctttcctgcagataggatgaggcgctgaatccgccaaccaagacaactttttatagaagatgataatgttagtttcataagtaccccacaaagcaaggataaaagagacgctcactttgatgacatgccgtccacacttctcatttgcagcagtgatctgggacagaatcaagtcgaaaatatttctcagaacaggctcgtataggtctcggacatcttcggcttgaagaacaacacgtcctcgtctttggctgggagactgggaattcaagttgaaatcaaagtgccaagactgactcgttgcaccattgaaatgagtcttgatcctttcaaactttttcatggcgcggctccctggtcggatctcgctcagggatagggaatcgaatcccccttcaactctagtggacagtagttcatagaatcgactgtcaatagcagtcccaccacagttagcccctgttgcgtattagtgctcagtccgtgttaattaaatcttgtgtataacttacccataacggtggtgatctgctcaagggagattgtcggatcaacgtctgtgacatagtatgttgtgatatcctaatcacagtgtaagattatgaagtttcaacggtataatcgggtatctcaccactgtaccacctccacagtcacagatcagaattccatcacgaggctaagggttgaatggataagatgtttagctaaacgaaccgaagacaccgagttgagaatttttacttaccttgaaactgacccttttgtcactgaaaacagcaagagctgcagcctctggttccggtatggtccacactcgatgttgaggcctttttccaaagccggctccttggattgcttgacgcatgaggttctgcgtgtcttcggaccagctggccggcgtcgtgaaccagaaatcgatcggcactccacttagacccagttcggcggagatatagctctggatgtgtgtgtagatctgagaaagataatcttgcacagtgtccacagcttccttctggtcaggcagctccagaatctttgaagcagtggcgatcttcaggaatgtatcgtcgaacttgctgctacttggaaagtttgcgtccaatagcagcttcgtccaggcatatgatcgtacatcttgcgtgacctcaaagccccagagaggggctcctccatcctgcatatatgaaattagggatggggttttggcctgaccaataatatctggaggccactgcttgataaaatcgatactgtcaatatctgcttgaccgcctgcatgagttgtaaggacatatgcgatttctatttcccaagagaattcgttagtgaaagaaatgaatggtttgttgaaggaaaatgtatttgcttacctgtgaaggtggtaccgtagtccacacccacaacaagcttgtacccatgcttagcttccatactgccttggaatcaagatggattctatctgtgttgcaagtgagcttggaaggacaggttggattgaaactcgacctagaagacccttagtgttatagatttgatcttccgtggctcattcccgatgggctagttccaacgatttccaacgatttccaaggtgatgtttctgtttcagtcgtcttttcaacatgaccatatgtttcattgcatgcaagcactgaagttgatgttaaacagaaccacctaattacaagattgaaggacatattagttctcttggtcatgtcattgggccgcagtttattctacctcaaagcatctggattagttccagagaagaataaagaaatgtgttgtgctaatctcccatggaggcactctgtagtctagtttcttctcattattcgcccctaatttcatctgacctcagaaactgaggtttctttctctaatgcagaatcccgtaaatattctacttctagaggaaaaggtttcagagaaaaataaagaaaaggtgtgtggttagccttacatagaggtattttggtcttttttgattcgttgcccctaattccatctaacctcaacacatagagtttctttatctctcatgtgggtttagtggatctggacggagtgccgtttccaataatttccaaagaagaataaagaaatatgtgtggcgagtcgcttatgtcggtattcgtgaaattcgaaaactcccggttccaggaagtaacaaagaaatgtgtgcgtggccatgtttctcccaaccagaaataaaatggaacattaccatgctgtctctgaaaattattcctcttcctttcttgtattcctcgcctctctctgattacattacttcttctgccatgggcgccactaagtcgaaacagaagaaacagaaatcccaggtaaagatgtgccccttttgttgctatatgtttggcctaacacactctcaaaggaagatactctatctgtggaacaccagcaaaagaaagcaaagatgtctacctgcagagatcccaagtatgactatccccgttatacacataaggaatacctgcgcgaaattcgtgagatgaaaaacctgatcgaggcaggtatgttgggctggcccgggccaggaaacaaagatgacatgtttcatacgctcacattcaccgtggatgtccaatcatttgtcattgaacacgcgaaagtcaagcctgaggatgtggaccatctctccgacacccagaaacagaccatcatcagccatctcgcgggatactgcgtgcaagagaagtgggaggtccttatggggctccttccagatctggttcgagagaaagtcctcgaggtatttctcgaaactctgatttacaaagacatctttgagaggtttttcgtgaactttttctggtacttcgacgggaaaatgtctccgacagacgaaggagatgaaacgttcactgcacgtctgaagcatctgtatgaccaattctatgccagtatgtatacaacttcccttccgaaagagagatatgtttcgttgaccatgatctttcattgctacagccaacccacttatggcggcactatggagatccgaaacgaaccgccttgcaaactcaacggatatacgcaaggcatcggacacactacttggaacttaccatctagatcgccgccagtcattcatcggtcaatttgtggataatgctctctccagtgagcctatccggtggctacttaaagagacatcaagcacggaggaggcagaccgtcggcacaaggacctttgccgaatttaccatatggcaatggaaagcgcagcagaattgggaaatatacgaggccacattgacttggaaatgctggcgacgttgcctaggaccttcacctccggtgagaggatgcagtcgcatgaatacaatttactacacgaggatagcaaccttctagatggtcaacggatcttgatggttgtttacccagggatagttcgcagatacatttgtgctcttgagaagtatgtcactgagtacagcaccgcagcatacgttgtggttgaggagcaagctcagtaatgatctcgatggaattggcttgtctgtcagtttgctttttttgtattgtttcttgttcaatatactccgcaccctcctcattatcacagtatgcgagttgataaaaatatttcaaaataaaaaagaatggcgccacccggaatcgaaccggggctaacacagatcattgttgtaccacaatgtgtcgtcataccactagaccatggcacctattagatggagatatggttctctttactgtatatgatctttactgtaattacccacaggggtagttgacgacttaagagataaacactatagttgtgcgtgctgtttccgtagcaattggcaatctcacgatacctatactagcttgccaggctaggctagcaggttgacttgcgtaatgtaagtaggttcatggatatattcatggtgtagaaagtaatgtatgcaacacttctgacagagaaatatatatctccaccccttgggaatatactctgctttgctactacgatgtatattcaattatttctacatgctctcatagctggtagaacaaacaatgttatggatcatattgttaggccaggtcaatatagttagtactgacagcatagttgtaagttagcgagtgacatctgtcgtatttcacgttcttgccgaagcacaagtgaatcgtgatccgcgtggcgtaacacgacaacaacctttaattattccatgttagcacaataatttgatcaccaaaaaagtactacggctgagtaaaggccaatcaataaataggtttaaccaaaaaaaaaaaagaaaaccaaaagccagacggggggctcgaacccccaacccccagattagaagtctgatgcgctgccaattgcgccagcccggcttggaatgtggaaagctctcaataatgtgatcgactttgcctcgcgtttcgagcctagttagcctactacattatcgaagagggggccactgcaacggaggcagtaggggtaccaacaagtcctgcctgcgaaacggggtgaaagcaaagtcattcattgggagtagtaggatgttagagagcagaacaccatggagtaactactagaatggaaggttgaagccaacctgaaggtgtcttcgttgctatctttgccttaggggtagttatccatggatcacatggccgcttagtcatcctgctctggaatcccccgctaatcgtgccaggcgcccaaaacacatacggtatacgcccacgcacagtaataactggttgacagccaaggactcctttctagtatcgaaatcctgtctgaatgtcatgaaagacggtccaaatgcgaccctctcggtagccattaaggtcctattcggtttaaactcggaaaacactctatatcgcgaagcgatatactaagctaagctgctcttaccagttcttatgtctcctataataagaataatcttccagcgcctaggctgaggtgtaacgagattatcaatctcctactccacaataatttgcgggacccggaacttctcgactcgaacataagtcggcatctcaaatgctgaataaaaatcttcattctggtgctcgtactcgatagcactcttcgcgcgatttgtaaagtgccttacgatgacatgttttgtgctttctttgtctactccgggcgcgaaagactcccttctttcaactgatctcccactttctgcttcctcttgtgctgccgatttaagtcgagatgcccagcaggagcccatcgagagggtaagtttggcgcaatctagtcccgactccttaagaagtgaaattgttaacaggatcgggattgttcccagaggctggaggcatagcccacggattcagactacaagcagcaacaatccatctgactcggatattcaacatgttctggtcagggattaagagactgtggcttgtcatgggagctggaatgaccgaacgtgctgcctactataccagcgtcgaactccagttgaaagaacatcggacttgatgattcatagaaaactatgtgcaaaattcagtttttgacaagttcaaaggggatgttgatatatcaatcccctatgattattgatttatatatgacccaaaagggtaattttcccattggactggctatcacggtctacgtctaacccctcttcacggcctctttgcgaccccaatcacacaacatggttgcgccccacgccgacggaaatcggggtgtgtgataagccacccaaggtgaagttgcctatttccatacttcgcgaaataggtctcgaaagcgtaggttatcgtcctagaataggccctcatatgggcacgttcgggagattgctgacgaggtagattgtggtgacgctccatacgagacaaggtcgtatgtggtgaccgtagtacctgcaagaccgcagagcaatcgagtatcaaagcaggtcgttctggtattagatgccatggcgaggactgcaagaagcaggattttggaaagtaagatggcttgataacgatgggtgttcagcttaggggaagaaatgaacacaactatgagtgataacatggatggtcatgtgatcatgtgatcatgtggcagctatcactcgctgactttgcccaatctttttttgccatctctaggcatcctgcttcttcctcccttaattgcggagcgaagcgaagcaattaaaaaaaataaccctctcccccccgcctgggaaggggtcccccggaagggcccccggagggaacgcctcgaaaggagatcatgtgaccaggcgctctctctactgggtcgaaaaaaatagaaatccagtcggtgaaaaagtaatcgctgagaaacggcagaatagatccagccggcagaaaaaaaaaaagcaatcatctagtactctgtactctaaccctatccccttaacataagatcctaagatccttaagcagctcaaagatattaaatcaaaggagcatattattagagggggcgactcactctcctatttctgtctagttattaggtggtcaattactacgtccacgggtagccactcatataaaaggtacatataccccatattatgtactcaaccctttggctagttaaaggagaaataagagtatgaatcaagaataaatttatagttgaattgattggctaataaaaaaaatctcggatatcttatatatagaagtgacaaaatctctatagctctaaactattcttgttctggctctctcttttgctccccgtgtatcgtattccaccgacatccatatactccacattagggcgtgccaagctacaacatggctaccgtagtgggtcactcgaatgacgctgatcctggtatgtacctcttttctccgacggcgggggctcgattatttctagactagcaagacgtatcaaataaatctaaagctaaagaaggaacaagaacaaaagcaaagaaaaataaaattccgctcaaaacaaaccggtaagggtaatgttttgattggtgtcagccaggtcattgttcttcggctgtcagattgttgtccgccatccacaggattccgccccacccccatacccacccccatacccacccccatactgtaccctgctaagtttcttctactccactccttcggaccgatctcatgcccggcaccatggtccgtcacatgttttctctgcaatagttagttgatccgctatactaatccgctaccagagtgcttccgcccagaccccatcacctctacccgcacctgagcccgcccggttcaacaataaccctgtctgcttcgccacaatccggtcggtagaacgcaaactgaacattgatgaaccgggccttcgggctaaagttgccttcatgaccagcatccaaactctcgaggaagagacaatggttcggtcgctgcaccctgctctgaagcattgcgattgtgtttcagtagttgagggtggtccggtgaggaaacctctgtggctagtccatgcccgcggcgcccggaatatttacaacacacacgccgctggcagggaaatacatgtcctgccggcacaaactcttccacccgttacacccttgggtctgttgatgcgtcctgtcaatatcaagcgtatcaacccccggtcttttctcgaaccccagaaagtcaacttaattcgcgaagcctttccaggttccatcggagcacaaatactcctcactggttggctattgattttgtttccggagaagaagtcgctagaggcatgctgggataagggtgtcccggacgaggtcggtggtttacgggtcggatacatcatagcatcattccatgcgacagctaacatcgtcgagtccggtcgagcggttagcagtgcgccaggaacccttgctcagcaggcggcactcggcctacgattacggctcccaggtggccaggaggcaatcacgacagtgacgcatgcgtttgtccgtcttgccgattccagaatgtcaaaaataaggaaacgtttcacggagtatatcttgacagcgaaagattacctcaagcggatgacaccaccgccgcggcagacaccacaggctgccattgtccacccgaaacaggttgcgaactcgccagttggtaaacaagtatggttgagcggaacagacacctgtgtatctataatctttcctttggtgtgccagggtacataatgtgaacataactaacctcactagattggcactattacagtaacttacgaccgatgtacgcgccaccgtatgattccatatccctatggatttcaacacgatttgagtttggtcactgggccgaacctcccccagctcacgaatccccccaacaccccccgggtgacagaatggggtccatatgaagcggcgcttcaaggccggccagtttttgtgcaccgctacaatattgcaaccggaagcttatttacttaccaaggccatggagtaacaacacaagcccagcagtgtattatccatgggacccagtacagctgggatgcacgggcgtttggtacagctttgctatggaggactcttcgagacaccgatagcgttcaagggacatcaagcagtgtcctatgcttaggcgaaccacagcacaagacagctagagctcttctcttccagaacttcgaggcacccctaacggcgagtgaaagtgtgcatatcgatgagaacgaggagggccctgtctttaaaggggggtttcttttgcccgaagagatccgtcgctcacatatcattaccgtgggagaaatatatccagaagacttccgtaccccgcagaaaagttctagctcggaggtccctacgcaggaatatggtatgactgtgtaggcatgtttgagaggagagctgttccggtagatagggaaaggtttgctagcggagagtacgaatatgggcggaaggatagagattgacttgcttgaggacatcattatcatcatcatgatcctttacttttccatcggattcaatggtatattccaaagggtatttaaagctatatatgtattactgtcgtttttgcgcaaatctaaaccttgcatgttgatatatctagtgtccgaggtgcccagaaagagaacttcgatgcattaatggaataaatttcgtttagtctcctgggttgaatattgtacctggtctcccccgaatccataggcaaggcatcgagtacaagtagtgcttagctcagctcgatcttcactttctcctgccacgttaattgtgtggctggctgtgataagaaagattcgtattctgggtcttgctttgataggcccgatctctaagttgtttcgttctgtgcgtagctacaggtaaaaatctacttgcggtgaatggcgcatgttgagcatcctaggttggttatcccttgagcatcgcttggtcttgtgtaaaacgtccacaccgcaatttttgagcagcttggtatagatgttacgttatggcttcctgaagcatactgaagtaagaggtgctcttgaaccacagtcgtaaactaatgtagatcacagatgatctgggttagactatgatatttgagggctttcggcgcctttataccttacattcctcatccatacaagtcaagtgggcgccaataatatatttaattagattaagaaactcgagctacctactgtatatagaatatatgtccctgggctcacacccaaaaatttgcggctggatcctttatgtaacagcatacatgcaacaagaattcaggccacgtaattcgaataatgcgcatgatctgttttttttttttttttcgtaaccgaatgcggatctagaaacaagcttccacccaataaaattccctccaaccgaacccccacgcagatgatatccttcacactgctagatctgatacaagcgggatgccaggtgggccgatcattgagatctattgagtagtagtgcatatctaatctatttagaaaccaaactacttggcttccatgtctctcttaggagctgtccctcgatgaaagtagttctagttttcccgcagcttgctcagccagccacggtgttcatataattgcatagcagccactggtatccaactcactctagtgcctcactttgacctttataggcagagagccttcgcacaaagacgaacataatatatagttaatcagattacatgaactaatcgggcaatgaatcaaactccttaactaatgatcttcatcgtacttaccaaccgcggtagccaataccagacatggctagtcagatagcacagggtggcaagttggatcacaaaatattagtcacacttcaccgatctctcatgcgagtctggaccagcccaacctccgttttgcttttcagcatcgacttttcgttctgaaactagattcggatccaggccgacatctcttgagattggtgaattgccacaggcctctaacattgcggtgagtttctgtctgactctgtattatgttttgaaagccggctgtagacaaggtggcaggtgatgggcaatgccagccgtgcatgctctaggacatgagatattgttcgcatagtccgcatgcattcagcatgtagtggtacatcctatcttactgtgctcttttaatgatttattggtagcatttaacacatcatataaacaaatgactaagcgagccttttggctaatataaaagtcacatcggtccctcagcaaaagcatcattgaaacaataattgtcccagcctccgaaccccttgaattactttcattgcagtgtgcctcctcgtttgccaggattccaacaaagactcggaaattaaaatgtacaagcagtggatcacgattcatcttatcaatagcatgcattcgggccacgtgtatgtcaagcatgccatcctggaatagtgagtaaatagtcgctttacagcgcttgtcaaattatattatcatcttctctgacagaatataagtggccgattccaccggaatggagacaggaatgatgagatttcgactgaaatgatcgaccaaacccaagtggctccaggtagttccgtcaatataaactcatgcggtaacccggccgaagcttcgggaacggagggaagcattgagttgtatgacggctataccaggattgccaaagtccattggctctgccacctgggtaaccattccagtgaatttggcatctcagagctgaacgaccattactggatcaagtctggagcatgggacgcggactcggcaattggcttccttgatgttcaagttggaaggaaggactgaagcaatccgcttactcggtcagacaaagggaaaggtatattctctttttcagtgccatctcagctggtatattttgtgttagggctagccactagcgtatcctgaaatggaggtttcgaactagagtggaaatccccaagatggctcatgtaattgagtagactaatcgctaaggttctaatcccatgtgcgcggtgtgtgtataccctggcgcttacttagcgagtacgtcgagccatacaggccaggccagttgtgcaggtgaccctcggggccgtaacactctcccaagtccccaaagctgtcctgtttgcaaaatgtcgctttcttcgtgggtcgatttttggaaatgcgttggtgttcatgctgagagttcttcgccatcatctcaactggaccaaagccctagctctgttgaacgcaacatggaagggtcttcacgtatcgacctaagatatagtgacggaaaaacggtggtaaggcgagtgtatatgtggcagaaaaatctcaataaattctctaactctctaaaactgacaatagtcctaaaacatgacaatctgatggacaacttagtaatcaaaacaaacaaaacaaaagaaagggtgtttttcgggcgaaaaaccagcctgttcctaacgtaaaggaattccaaaaagatgcagcagatgtaatctgatcatccaaggtgtgatcagggtcgccacattctcactctcagtcgattagatgcgtccctgctctctgaggatccagactgggacgacgtgctgcactttccaatcatcgactgaattgaggccatcatgagcgaggccatgtgagctgccattaaagaagatggatcctccgtggtagagttcttcggttcgatggcttttcgggggaccgctataattttcgaaaccggatgcgtttcatccaagcaagatgcaccatttcggagacagaaattgcagacatcatagtccccaccctggcaaagctcacagtggtaaaactcgtccccactgcagatgtttacccggcaaatgtcacagaatttgggcgaggccatttgatggacagtctctggtaccggcaagtcatgatccacctcatccgggtctaatagaccacagatgtgtggttggcttcgctcggaagcttccgagaaggcagtgcgcccaaagcgatcttggaggtgtttattcacattggtgattttcaacaaaatctgagtggcctctaatgcccctgatgctgccactgtcatcagtggagtacgaccatacacggtggctaggttcggattggcaccgttgcaagccaggatatcgatcatatctgtctttcttttcatttgggctggggagggtgacgagccacctcttctaagagaggctaggaagaggggtgtctcgccgagatcgttttgtgtgtccgggtttgcgccgtggcgtaaaaatattctcgcgtaatcctcatttggggcaaaggcggctctggccagacatgtccttccattttcatctttgagatcaatgttttgaccatgagagatgagcagtctcagcatagcctccatatcattcccaactgtctcatcaccgtcaaagtcagacttcccgtcaacctggactgtggacaccacagaaaagatgtcattcttgttgaatgccttttgcttgagattatatgaggatcgcctgactgttaaactgcttttgaccctcttagtgaggaaaggtctgatcaaccaaaagagagaggattggttcaaattgttctcgttgatcagcctggcttctcgcttcaggagcatgtttgcaattgcctcgtaattctgagctacggcccaggaaagagcactttcaccggccttattcgcgaaatttggatttgccccatacttcagcagcagctcaaccatgaaatcgtcaccgttgagagtggagaacaacaaaggtgttcggctgttctgttcaaggcagttgggatttgcgcctgctcgcagcaacaattcaacggctggtgtattcccaagttgcacagcccacaagagcggagtccggcctgtattgtcttcagcttccgtttgacaccctttctgtagaaggagttccacaaggtcattgtgcccttcaatggacgccaaagtcaagctggtttttcccgtttcatcgcgatgatggaggtcaaagcctgcatcgatgagatgatgacacaggttaattcgcccacatcttgaagacacaagcagagcaaaatccccaacacgagttgttgacgtgaggtaagacagcgaatggcgttgaagaactgagataatagccaggtttcccatctccactgccgacaaaaacgctagctttccaacggttccgcgttctccaggcttgatattctgaacatatacccggaggtccgacttataaatgaggtcagctaccttgttgtgtttgaaatcagctgccttgtacaacagaggctccgaagaaggagcgtccatatcatcaagccctagatcaaccaaccgctgggaaagatcagtgcagcccgcacgtacagaccagaccagtggagtcactagaccatctttccaagaacgtctcgccgagcaagaatttttccactttgaatatccctccccatttctccccgaaatatgctcacaaaacaaagcaaagagatcttttgaaagtctcttggacttggaccaagattcttggacttgttggaacttttctgggtccgattccgaccattgactcaccaagtccccgtctccaactgcgtcaaataagatatgagggtatcctaaatcgggagttggattgggatcagccccatttgctataagcaattcaatgatggcggcatattccatgcaagactctttgtcagcacaaaggaatgtagctgcctgaagtaatggcgtctctcttaatttgttcctcgggtccgcgtgagccccaccgttcagtaaaaggtggaccgacgacagagatcctgctctggctgcgaagaaaagcggagtctcttccaactcattcctttgattcggatcacttcctcttgtgattagatcggctgcaagtgagttggatgggcattggacggcataaaagagagctgtgtttccaacaatgttttggctgtcgagcttagcaccttcgctcaacaaaagtcttgatatctggatgcgcctcgcttttatggcaaagaacaacggtgtttcgtttactttgtttgacaaattgacgtcggcaccacgctcaagaagatatctcacaacctcttcatgatcgttccctgcggcactgcacagagggggatcctccagggagccgcttggttggttggggtctgcccctttgagtatgagagcttgaacaattttcagatatccctttgagactgcccggtccaatggagtctcaaggtcccacgtgattgccctcagatttgggtcagcgcctttcatcaacagcgcatttaccaactcttcatcaccactgcgaacggaatatatcaaagggttgccaccagtctgatcctgagcattgacatcaatgtctttgctcagaagcagtctcgctgtgcttttttcacccttgaaaactgctttgatgaaaggcgttcgtccgctcgtatttggcaagtcaggatcagctccatgattgagcaacagttgaaccatctcgtagttcgcatcagacactgctctaaaaaccagctccatgttcttgttagcgtattcgctgatagtgccatcctttggcagaagtaagcgaactgcttctaggtttcccgaagatatagccagctctagcggactatcctctctgaaccaaccacccctgatatgattgtattcaggattggtcccctggtcaaggaggagcttcatgattgagacatgaccctttccagcagcttccttaagtgcccgctgcttctgttcttgtccaacttcggtaccggcggaaccggatagcaaatacctaacatcggcttcatgcccttcaccagcagcttcctccagtgcatcatcttttgaaatcacaccatggctcatttcaggcccgatgagcttgacggtgctctcgtgacctgcccgtgcagcgtaggtcaaaggggtgtcccccttcgagtctttcgcattgacttcagccccgttttgaagtaggatttgaagccattcagtgagaccaaagtatgcgcaaacatgggctgccgttatcctgcatgtactgtacttcaagatgtttgatgaatccaggggtttgccccgcttgattggaggccccttcatgctttgacaagcagcagaaaagcatccgatgctggctaaaaactgaagcgcaacattttttgcatcatcgctatttgaatttcgcgcatggtctccccagtgtttcgtgcaatacatgtacaagggatatcgctcatgccgatccatgtatgattctgggttactgcagcggccgaaggaaaagggctcaaatgacatgtaagtgagacagtttagcgctacttgactctcggggtccttcaaaataccttctgtctgaagaaactcatgtgtggtgtaatgaatgaggcgcacaacatcggttgctcgatcccagactattagtcccgcacacagattatgaagaatatcaatatccagcagaagctcttcatctaggtcagactgcccgctttcagtcactaatgcatgctgcaattcgacggagctgagtgcttgtttgctgtgggcgagccaagacagagccttccttgccaaatcgcgaatttcatttgcctgtcgatcaatgtccgacatcgctcgtacataagtcggggttaaaccgtcctgacctctgggtagagcctcgagggaacgcttgagatggcggatcgttggcatcttcatcaggtactctgtatgaagctgagcaagcagaaacattccgtctgcagcttgaagcaccatggattggatatgttcttcgagatatacttttccggcgacactgaccacaaaaattggcaacttccgattcaagtataggaggatatcggcttcgtgcgcccgaatttccttctgtattgagccaggaaattttgacgaaacattcgtgttgttgaaccgtgaagtcatcagcaaattgattggaatgtccctttggatatcagatagctcagaaagcagtgtttggtggctctcgtaatccgagacataatattcgtccactgcatcaaggacaatgaacacacggttgtactgcctcagacattggcaaagcaccaccaacagctgtttgactgatggacgagagcccgcagtggcatgttctttgtggaggcgtttgatgttgtctgggatgcttctctgcttggcagtgacctgccgtagcagcacctgtagcatattctgaacagcctgttcagattttggctgatagctgcagtagatatatgcaacaacagactttggatcttgcttcgtcagagattgaagatgctcaatgatggtggcagccatgaccgtcttcccagcgcccgggataccagggcagaacaaagtttgaccagcgctttgaagccaattcttcatttcagcggtctcaagaaaccacaggcatgttccgtctattctttgggccagtctatcattctgcacatcgttgaagttgtgtggggatagccagtcaaggatggccatttgatgctcttcaacaacagccgtattgaggacagaaacactttctttgattgatgatacgtcctccctaactacacatgtcggagggtagatcagccacttgaactaccttggcatcacgaccagacaacggacaggcttcgatactgaccagaattcaagattttttgcgcagtatcctctgcttcaacctctttaggcgtcacaaattgcagcagttctttggcacaagccgatgcagctactgcagcgtagttgtgccaggtgtcgttcttgtgggaatctgcatagtcggatattccgcgaataacaaggcagggaaaggcgttcatcaacccagccgcttccatttccaagcaaatggcctgatgtgtttttccaatttcggtccgtgttggtgcgtgcttgacaaccgcactgcctgtagcaatggttccataatgaatcaccgggctggtatcatgtctttcccattcctggcgatctatctcatagtctttgtcgcattccgcacatgttcttccaccaacgtgagggtattcggcgtgaaacagcctatcagaatcttgattcggcctgacccaaccacctttttttctcaacttcgggtatttggtgagtgctttctcaatgaaagatgcaacctgactttcgttcaacatatgctcagtctccagccgggttaaggctgtcctcagagacctcggcggctgattcaacgggtacctggcctggaatgagccgtctccgagcctcctgccgaagtcatagacaacgactccaccattttctttactggaactgacaacaacatctccaagacgcacatcttggacctcatcgagctcgtagtcagggatccctgctccaatgcctaccatcaagccaaaacgaatgccaggaaaggtaaaaagcatgtccttggcaaccgcggcggcggagctggagccaatctcgttctttggcaaacatgtgatgacaacattaaattttcccacggctcccagcaaataaatgttgtcatctgcctgcttcggtggtgtctgtgggccttcgtgctcctcgtccaacatagccttggctgcactcagctcgattgggagcgcacacacccatccgactgtgtatctttcattcggcaagctagtcgacatgatcgtttcaattgtcttgatgagatgtaaatgattttaagatctcagttctaataacaagtacgactcgagaatatgaaatgaggtgccagatatccgggatccaggggcacataaaagagcaaaggtttacggcccaaggcatgcaactcagccgcatctttcccgtacaaagtacggagtatccctatgtaaacctgttttttgcccaagttgcgacacccgggcaaagatcagcacacgctaagaacttggctgcatcagatctgcaaacccgggcgctcgtgccaatcgtgctagggagtacggagtagtagggaccaccttctcagtttcatatttacgcatctgccgccgagtagcaatatgacacagaatagaggataacccgtctagcagtaagacttctgagttgggagaatatatgatcacatcagcttctggtcaccggccatcgagcgacaatcagttttatatcagcaacagttatgtgggcaaggttgattatgtactcaaaagcccatagtcccatatccatccgatatgcagtaactcgcgacacaagcaagccctggacgcggctggtcctcggacggggactgtcccaggaataggaaccgcctcaggacaaccggggtcgcaagaacactcgacggaactcacatgaccaaacatatcccatgatagggttccccagacgcgcccagggccagtgcatggtataaagttttcaggaggtaaccggtaccttgtaacaaacattggaccggtcacgcttcagagcattgctccagaccaacaggacgggagctaacattgtttgcaaattctcttcgtcagagagcagtggatatgctatggagaaatgcctttctttcgactaccgtcggacttcgagtcattatctgttgatgtgcaaggcgatcatgttgctattggattccaaaatggtcaagttttgtgctttgacattgatcgacgtatcctgcagtcagtattagggtacgctctatggacaatcgagcaggccacgtagatacatagaaatccggtaaagataagggtccaggcacgacagtcaggcagattcgctgctaagagtcctgtactgtcagatgccatttttcagcacccacagaccttttgtatatcctttcaagtcctagtcaggatctcgtccgtcgtctttattgtttctctttccaacgttcctaccatcgccaaatgtgactgcacattagagtatgatacaacatatgtattgctatattttatatcatgactaacaatgccgaaaagagctaaagaatcgcacctaacgccaacacgctttgctagaccagttctagaatgggaatcacttccttcccattttcagcctagtcacgaatgttttctacgaataattccgggttccgatccttgtagatgtggtcaaggtcaaacccatctgacagcgttacgtcacagggatcagtggctctagatggcctatcaataagttgccgcccctcaaaaagttggcggccgtaaacaccgtgctagtcatatactaagcgagatcctattaatgtcgtgccacaatcctgctagttgtgaatcgcctagcaaacatgttgatactttggtctggtttaatcatcccctctacagccatctattggaatgccgcagttttcgagttgagagatgatgacgtgggtgctgcggggctctgcgagtaaatcgcaactcgctgaatggatggtgagttgaggggtaatgttaaatgaaattatataaaagggtagttaggcgcagttatttcttatgtgctaagaattgtcatttcgctacttccttgttttcaaaatttataaaccatctatttgtgaatttgctgaagaaaacctattgatcagaatgcctgttatagccatcaactcgtacgtgatgttacaaacagtttcccccctcagaccatattgctcagtgctaatatttccaatattgtaggtacgacgaattcaatcaaatcatcaacagcgggaagcccgttgtaatcgacttctgggcaacatggtgtgggccttgccgaactatatcgcctattttcgagaaaatgtcggagttggcggagttcaacaatctcgaattttacaaagttgatgccgatgaacaagaacgaattgctcaggaggtcggcgtacgttcaatgccaaccttctatttatttaaagacgggtttaagattaaagaacatgttggggccaacccgaatggtttggaagggcttcttcaggtagccgcttctggagcatgaaaaatggaaggcaggattgcccccattgctggaaggcggggaagtagtgaaagatacctatctttagagaattaactctttgttttccgcccataacattttcccatcccataataataataataatgacttatatctaggtgacggaattgtggattcagtgtggccgccctcttgctgcctatagctctttagctaacaaaagcgagctagttccgatgattgtttcggtacaatagttcttagactttagcactcaaaacgaccgccctcatctacataatatcttagattttcgagcagaggggcctagttcgatctgacttactgtaccacagtatgaattttagctatagtatcgcgcaaaaatgaacataaaaaataattcaggtattagtacagctgcaccacacgctaaaagtggtgcagtggttcattaaccataaaaacagtcttagcaaagcctacaaaatgttaactcgttcttggcctagatcttgtcaatatttgactattttggttcactctgtggaggttcagattgtctacctattttaggtggcattccattgtagcgatactgtaatagaactcgtccgtcccttaagggtctatgtccacttggctggaaaataaatcaccatatatcacacagtgtatcgactatgggcccacgccggaattcacatagttgagatgtcgatggtgaggaggtggattactgggaacgtcgaaaataatatctcgcgtggttgacaggcgagggggtagttcgctaatccaaggagttcaaagagatgacctcgagattttaaagggatctacccatagaaatcattattcacgacttacacatatactgtgagggagcatgttcatagcttacataagctctaggtagctacacctagagcgtagacaacatcaataataagcatctttaccaccactaagcattttccataacagattggtagcatatcctgttaaaccagaggtccttctggttaggcacacctttcagctattgaatttcaagtgtccctctcgcccctaggtcgctagtagcgaagggaatcctaagcttcatcacttctatcaaccaagtacccactttcaattagcccaactaattaccttatcattccaatttcaccctacgtcaaacgtagcactaccttatcaagtatttagtcttaacctttgaattccgaccacatcgttaccactagaggcagacaatttttttttaaaaagcctgcgttagtacagtcctagcaaccataggacccgagccctaccttcgattagggtcgcgagtactcgcggtcacaggacccgagccctactttctcttagggtcataagacccacaatacctagttacctgcccaagtcccccacactcttcctaatcaccaatcagggtaatatccgatacctcttactaagagacagctctgtacctatatccttatcaggtaccagcttcttatatactttaataaatacaatagtataagcgaagagctttagaccttagaacttaatcataagatcctctttatcatatatacttataatataccctacctacctaaggaaaacccctacctaatagattagctacttcgcaaagaacttataagggtaataaaagagttctatttactagttataaggatactaacctataagccctaccgctaaatctaagataaggatcgtctattatagttctagctactaaggataagtctaataatactaacgctaatctttctatagtctagagatctcttagttagcctaagcgatctactgagcgagtattcgcgagctagtaatgtaggtatagactatagcctcctacctcttagtactctaagtcttatataggagtcctatctagaagccctagagggactgcagcttatcgccctattaagggaagagttaagtaatatcatcgagtaagctatagtatattcttactaggcctataatatataagcgatagttaataaggttattatagcttactataaggaaatctagggactagtaggctaagatagctaggatactatatatagttctagctattagaagatagataatatcggctactttactctagatctaacgttagatacctatatctatactataaggggaagtatatactatactaatatatatactttcctaaattagctctaggccttagtttccttaaaatctaaagaggttatctaggctaacttacctttatacctttaggaggtagctatataatagtatactgctgagttattagataaagagtattaagacttaagtatatactccctataacttagctagtatattatactcgagagacgctttaagctatatataatagaggcgattgctagagtaatagttcctaccttagtctactcctagtataatatccgcgcgggatatagtattatagaataggcctagaatatacttcgcgatatataagctgtagaaatcactaggactataatactcctatatctagtatagatatatattaagccgatactctaatataatatatataaacccagcctagtaataataatcttacagtttatagtagatctcgatttatattatagttagtagtataagatatcgcaatgtacctaggtatagtagtatctaatatagccttaatactaccctagatactaaggttaggcccccttatataacccttatctagtatacagctatagtattagatacagttacctaagtctaggataccgactccctttctacccctataatataatacctataataactaatactccctagcctatatagaattaagattagaattgtgactaataatagctgtagtagaactaaaggactctatatacacttctactaagtggcccctaggtatagtgtgtaccttatatactataatagtattaatagtagcagctaaataatcgtactaactaggtaggttagcttttactagctaataagctatagaatcaagtaggctactcagctactggatatatagcgcgttaactgcgatagaattatcctatagctatatattaggtcgattaggctgctgctagggaatataggtagttagatactaatcttactaatatagctttctataatagcgactatatatataagcccctaggtatatattatataggcggagaggataccagttatacagaataccttcctaaggaggatctataagtatcctagtaagctccccctttttaggaagagtaggacgactaactatattattctattatagaggacgttataccttctactacttatctatattattataccctatttaaatcgaataataagctatatactcatttaaaggagtatattatataatatatagctactacagttaataactcgatagtggtatactatacgactaatctagcaggtatagaagtagatactatcctagctaacttacctataataaagttagataggccctatattacctaactaggtatagtatataagacttagcgctatatattagcagttattagactaacgatatagtagaagctacttattatatatcttaataccggctatataataataattattaatatagatcttataaagtctctaggtctatccctatagaaatatactctaatactagttataggtattaggtcgtactacctattattagcctttatcttatttaatatattttttagaggattagataatatagtatatatttatattaaagtatacttagtcaataatcttaaagttaaactacttattagtatagatattataggatataaaggtttccgtttagattttaatactaagatagttaagattctatcttatataggtctaacggtacctatctctatatatactaagccctattatactgtatagtaggtagtctatatagtagcttaggttaccattcccctatagtctattatatatatccctatataggtataggcgttattcctagaggactaggattatatatttaagggttattatagctataccgctttctattcctaccttatagcggtaaattttacttaggtctaggctattaataatataggctagtaagtatcccttcgccgttaggattagattaggatattatataaagtagatataccgatagcctatatagttaaactagaagctatagagctagaacactctcctattataactaatattagatatactaacgagggtctatattatatataggataacggcgtttagcttattaacggtattaccctctaggctagcttagagctatcctaggcctagtagcttatagagctccttatatcttataatatctagggtaaatatctaggtattattaatatccctaaggacagataaataactattccccttaagcctagctaggaagtatagcttcctaagtcgaaaatctacctagttagccctaaggattataagataattaacgctgctttttaactattatataactaagggaagataagttatataataggatatatagctacaggtttccctatctttattatatagtgtacgatttaccggcctaggcgtaagcctaagcgtaagggtcgcgctatagtagacctatggctactaaataaggaagtcatatataacgtttatcctattctaactatagataatattttacttctaatatagggcaaaaagtttattactatcttagatatatctaagtttttttattaatagagtatctgatataagtatcgcggtaggatatatattatctcttattaggactaggagatattttatattataatcataggattctataatagtataccctatatctagtaatagatagacctactcctaaaagagtttattaagttctactatacctaccttaatgatcttattactatttctaatacctttaataaatatatcgaatacttaacccttatccttagtattctcgaaaagtatagggtagctttagaacctaaaaaggtatatattacctttctagaggtctcccttttaggctaatagatagatatattagggataataatactagaggataaaattaaagctatcgctagcctagagtttccttagatactatagtagctagagatataccttagtataaccagtaccttatatcagtatattccttactatataaagaaatctaaaccactctagatctataagacagagctcttatatagaagcctagttaagggccgtctgtattaagagtagtctatatatactaagtatatatatctaatagactataaattagtgttatttaatactatataggtagtcttttaagacctttagtagctagtacactaggactgtagttataggctctactttaatattaataccttataggagggtagccacagcgctatggttttctaccttaaatatagctataactatactaatttaaaggcaactcctccttctatagctatagagccagttatatttttaagctatctattaatactagtagagaagtagtactaggtaacagagttagaggtttcctatattatataggttatttataagatctattatataattaaggtagcgctaaaggaccttactccggttatatataccgactatattataacaattaacctcactatatcgctatcctctgtgttactagactatataaacctatacctagtatatactttataatacctatagcagttttatctacttatctactataaagctaataaactaaattatattatagatactcttttgtatctactagctatagataaagtagaactataagaggataataaccttaaggccctatatattcattctatatctaatatagcgctacctagtatagggcctatataggacatccctaataaagtatatactttccttatatcctatatacagctctccgaagaatttaaaggatatatacgaactatatattaagaggatctaaaatagagccttatttttagtaaattctagcgactcgtagaggatcctaacctaattaaaccatatctaccctatactactaacgatagtttactatattctatataaacagatagcgaccactagctatatattcctaatctaattaaaaacaagattttcgagatagcatatagtaaaagataccttagcttctactatacctagtaaaagatataaggctttattatatataaaggagtaaagaacctctgtacttatatcaatcaatacgataagtataagaaaaacactatatactattataagccttacagttcgctctagctaatacttatactacctattcctttttatatacttactattaattttattataggtttactataaataaagaaagggtttaatactatagctatctatatatataaatctacaaaacacattagtttaacgcctaggaagaaaacctagaaagggtataactaggtaactataatactataagatctctagaaaggtaactagggagtccctattatatagatttctaactataataagtgatttatcgaaggcttctagaaaggtctctttactaccttatatataaagctcctatataccgtagtatactatctatctactaatagctaatctaagcggttaaactagactatagaaatctagctttactattagtagaacctatatcaggataccaattaggataaggggctcacgctaatataggtatcgctaaatatatctaaaaatatagctattaataagtcgctatataagttaatatttagtattaacctataaatactatagaacctcctttattaggtatttatcagatcccccctaactacctagtaagacgccgataagtatactaagtactctgtaatagtaataaagtagtagtataataggtagtatatacctattttctttaaaaaaggtaagtatatttacttataccttatctaaggagtagagcctagatatatcctactatcctacagtattatgtaaaaactgatatagtattacattaaatactacgttattaaatatataggataccttatatactagctacagttcctacctaagttagcgggcgcttatccagttatatctttataatatctagagtgtatacctactaaaggggagatatctatagaacctctatcgaccattaatctatatttccctagagatatagattagaccgatattaatactattcttaatatacagtaccgcggctatagtagggatcagtgaaagtaatacctagtttagtagtctaggcttagaaataaatacctagaatagttagataaggataacctcgttagagtagaggagaaagtcctagagtatctctaagatatcctatattatatataggattctattaattaaccataacctagaaggaatctctctatatttatatttatttattatactacccctctatctaccactagtaccctattcgtttactcttttattatcttatttctatttctactacttcgctagtatctactaccttacttatcttttagttccttaactattttaattatctagtacctctcagttttcttccttctatatcccttagcttactatttaatatactacttattgtcctacccttatcttattaatatacctatctagagatctattagttataggcgttatccttaagctttatagggatatacttatacctattatactatagtaagtgccctaaataagaacgctatagtatctaaccctactaatactaaggataactctctacctactactaagtataatactagcttactagcagataatattatagataatagtaacctaggcttacttaaggaagcgcttatcctacctaaagatagatagactatagataatctaaggctaagattatctcctatactaagaactaatattatacaatatactttatataccgaataaactttcgtgcttatactctactacttctataataagtctaccctatatacactatattaggatagggcgaatatattatacctaatcgatagctaatataatagtaagagacctagccctttattagataggaagattaatatacctactatagcgatatggtttatcttctactttttaatttataactattaggataaccttaaatataaagcctatcttaccttatcttacgtttaactgatagataagggcgtcttctactacctatatataataatactatactagagaaattcctacttttagacagactttaaccaatatagggatatttatacctcgcgtatacctctagaccccctaatgattatataggctaatagattaccctagttcctagtttataaagtattttatatcctctataggaactagagccctatatcatatcttataggaaggaagtaccgctctaagactacagagttttatattagtatagtactagccctacctactactgtcctagccagccttaaagattctctactataactaactctctagacatttaattcagcgacttacctagatcctaaggatataaatggttcccttaacctcacttatatcgccactatcagctatagctaaaataagaccccttaccgcttttatataaaccaggaccctaaggggtatatattagtctactaattgaaggctaaggaggacttagcgttctactagctctaagatctaactagttatcataagtatatctataatataacccacaactttccttctatatcctttcctaaagccaagctatataatatagcttagtaggttattcctaaagctatatttgacgatagctttacctataggaagccctttctaggcgttaacatacccgtgtaagataccggcactctatagctagtcctatagacagtaatatatagtattattaactctttcaggaataaaaatatccgctaatataagcgcgtataccgagagaaggagcgctatactaattctatatctaatatacacattccgtcctaggaaagggtcgctatatcgaagcccctctctagcctactacaaaatatagagctacgcttccgtatcagttaggttaacagtaccctagacatcgtcagtcctattatatccctcctactagtagtagaggccttatttcagaacatcggtagctctaggaggctggaacgtattgcctccctaggccataccggcctcatcgacttccgcgcgcgtttcgtcgagggagacccccgcgttacctgcgctatatataaggggctcagcacctcactgaacgctatccgcgacaccatagcatttactaagggcctactgctagttaaccgatacattaagacggtaaaggatgacgccgtaaggcttaaggtcgaagccatagcatccatgatacgacttctaccagaaactcctttacaggaagggtcacttgacttctaactgaggctgccgaggacggtagcaccctttccgaagggggcacttgtgagggagcatgttcatagcttacataagctctaggtggctacacctagagcgtagacaacatcaataataagcatctttactaccactaagcattttccataatatatacagagtagtgcgcgcttcccggacaagatccgaaaagcaatgcgtctgcattctagctatgatggctactccttacagttacgatatatgaagtcttatatccttgagagtatgttagttaaaatactgtaacttataacttaggtaattgaataggcataactaactagttaactattatgtctccgagtctacccctaatatgttatattatttcttggcattacggtttaaggaacaatcgaagagtgtaggtggtaacactagtttcgagacgtactgtacttgatattctgttatgccattctgaagcagtctaggagtttgcggtagctgttgtaataggacttctaggtcattctcggagtgatatagtagtcggggataaggctaagtccacaatccagagcttaacgcagacgtgccaacgtacgttcctggagcgggggcacctttaacattcgtctgtttggcctgtttgcatgactaaggttctagaaaccctggagttcagtataaatccccctgccaatcggttggctatcgcaaagccaatcctccatgtagtccaatggctatgtcgtgctattgttggagcttgtatctctgcgtatcgctcatggccgctactgttatcgtcgggttggttgtgctgcgcctgccaattatttcgtggcctaagctaaaagatggaacacttaggacgctgctgctgcagaacatcccgtttcttatatggcgatctcattctgtaagtgggtcaaatttaggaattcctgcaagtcgtgttgatagtgggtctcgtagatatggaaggataattgagcgatggtgtatgacatatattgaatcccaacgtgaaggccatcctgatctcgactaacctgtcataggaaaaggggtgtttggcatcgcgagcgaaaccggtcgtctattcgagtagtcagactaggtataaatgaagtcgcgcattgtttgctgatctaacctcgaggcagattttgagactcgccgggcattattctagatacgacaatttgatgagtgaaagccacctgagtagttacaggtcggcgcagcaagctaacggcaaaattgtctcagattagtcgtaatgataggggaaacagaagacgggctggagtgagtaaaagcaacgtaaattgattgagaggtacgactagtcgcacagaagataacgcagggggcggagctcggtgatccgaatgaatagtaaaaatgccccaccaaatcgagaatcaatgagactaagaggtgagggtaagaaacaaggggattacaagggattgaggagggttttatagatccacgcacgggaacgtataacgacaaagagcgctaagccgaaagggttcgtagagccaataatatgtcctttcttcacccaatgtccgatatggtgcaatagggtgtcccggtgaaaagaccatggttctgcgtggcatcttgtgggggaaaccgtggtattttcgcgcaggcaagaataaaggatatatatagttcttgggagatgattgacctaagactagccaaaacacgacacttgcatatcccagcggctccatcatgagtccatcattgtagcccaaaatagtgatataaccggcttatgtccgattcggtccagcctggtaagcctggcgcgtgcaaatcccggcggcttgttcatgagttctgagtagctctggtataaaagccaagattgtcacccttcaaatttcttataaatcatcattcaatcatcatttccttctgagcctattataattgagatgccatcaaaaggtcctcgaagccgatcacggactataatgcctttatccggctgccagacctatctatcaaacgtaagagagccaaagtaataaaataacgtctacggggaattcatagaaggctttattcgctagtatttagataaatataacgaagaataccactctagtcttaacagtggtgaggcttttttagaatatattagagcgaagaaacaggccgtaaccttcctcgtgaattaggacaggatgtggctgcagtattctttaaacagtcaatttgctaatcctttgctgaccagagaagctttctaatgatcttagtaaagagtataggcttaacttacgcgctaagcaatagccgccatttagtatcaacgagctcttacttattacctatcatttgctagatacctgcgatatagctttttgtactttccgatgccttttacaattaaacacgttgcgaaaaatgataacttcaatatcagcccaactctgtctaccgggtacataaggggcaatgatgcccttaaatagaaggatattaagctattcatggtgaaaaccccttaatatgtatatgccgaattgggcacaaagtgcgggcggggtttgggggtacttttgtctttgctggctgtcagatcaagaacattcttttcaccttactcttacctcatcgcaatggactctattgaattttcaaatcgttcagcttatgcaactgaattgggcattgagttccttggccctaacgaattcgatcgctggccagagacccatcgaagattgtttgaagatgtacaaaagctcggcaatcaaaaatataattcgttcgttgttcgcatcaccagagaatctattcaaaaaccatggatgcgcgcaacaaaggcgcgcgccgagcgtctctcaatgttggccgaacgatcctatcgcgaacacaaaaacgagtcgggatggaggtacgcagttgagaacgagatcatgtaccgcttcacagtggaagtttcctggtaaggaaattcgaacagtttgttgaatccagacttaacgtacggcacagcccgacttgtcgcaataggctatggcaatctgaaatacctgctgcaacgggtagcatcgagcagcaagcccgctcactagaggatcgacgacggaaacgcaagccatgccagtgttcaagcgctcgaggtgacaataggtctgttttgtgttctatcatcgaggaaattactagttattccttctaaccagtccataggtatgatggcggagtcaatatgctcttttcggacagagcggaggcgatgatcaaacacaatcccccaattgtgatatccacgcatccgcgtaaattgaagaattccgaattcccagatcgcatctttggactacgacagaccgacaacctacgatgtttgctagactcgcttgataagaggcatatggaatcgtccaacataactctgcgtaattccatagagctgagtccatttggtgccgagcctgagcctctacttttcccgttcttcatgatagaagccaaatcaagccagggggctgaccgagcaaaaaatctaatgcagtctgcattttgcctccgccgtttgttgaaaattcagcatgaccttgtcatcgcaacagatgaggaaacgcagtgggcaacagggccgctcatatggtttcttactacacgtggagaacagtgggacgtatacgcaggatttgtggaagaagacgatagtgaagttgtcaaatacgtaggtgaaaattattccctacagaaatcattcgaggtgcttactagcgtcagccttttgttcatctgtggaatggagacattcgctggcgggacggcgccttgcagcttctgctggttattgactacatctttgattgggctcgtgatgtctaccgagatgccattatcaaagaactcagcacaatagcgactggtgaagtaaacgaccgagatccagatattttttcgacaatttctcgacagatgtcgcaaattactagctggatggaccccgacgaagcgcaaaccgagctctcattcatttctgaatcaaatgatcccggctttttgaacataagtctaccagagggcgtgatccgtgatgcttctatctttgagtctcgtttccttttgctccaaattactgaggatgacgtcgataattttcttctctctttctcatctgaagaggatgctaaattatggcttcaaagtgtactaaatcatcttgcaaacgcctggaaagtcagctctaataccatctgcgccatggaaagcatttggactggggggctcaggctaacacgtgggaaccaccagcggcatgaattgttctatatcagtatcacaatactgatgtttattaccaataactgggagcctacaaggcagctcacgtgccttgcaatttctgaaggtgctttaaacactcttttagaaaagtttgcgtgcgagagaacttctagctttgaccgttgtccggaagtaggggaatcaagtatgcaaacttttctggagcgcatcttgaaacagtcaattatggataatcttacagcagcgatatctatgctgtgtctctcgagtttctcttctgagcatgaacagacgataccatactatttccaggtgaagaggtcaagagaagttactgctggacttcgagttgataaatctcctcacctgacacaaatggtgcaaagcgtttacttgaaccacaaaatcggacaaagacaaccaatggatacatatgtctccttctcacgccatcaaagcaagcaaaacatcgagtatagaggggatacgattgagatgtggcctcatttaccacgacttgtgaaaagcggaaatgatggcgtattggtggatgggatgttccactcgggggatttcccaagacgagggctctttgttttccgtgatttggataactatgaaagcctatccagtctattaactagggtatcaagggatggtatctacttcaaaactttccagttttgtccggaccaaccctttgtggatggatttcggcacctcaacagcccggtccgatttactcaagattggctaaaacggtcaaagtcaaagtcaatactgtgttggatggaaaagctggaagccttggaccgcctacgcggctgcccattgggtggaaggccatcttctccaatgatcatttcgtcagatgaagaataagacaaggtaaatttgactaaactatcaatggtaataagcgaaataccgttaagatacaaattgttagtttcaaggagaatatattcataccgtggaagcctgggactcaggatcgttcttggtcaatattggatttggaatctaaggtggaaaagatacgtataaagagttcacagcacattatggcgtcacggatgatgatatgcacagtaaagagagaaaagatcttctacttgaacaaaggtctcgctaggcagaataaggctcaagtcggtcctaacatacatttcataaaccagaaaactttgttttcactcagtcccaggggtaaatgatgccgcaatgcaaatctcgagagaacttcgcatctctttgccggggggataaacgagagagactttgagattccgaccatgtagttccatccttacatcataccagatctcataatacttgttaccctgtgatcctttcaatgggacaggatattcctctttccacttggtcaggtccacactgatcatcccagcgctctcacaccctgaatatatgtcagtctccacgttaatcgttaatccggcgaatacactgcaattatataacaagatattactcacctagattgtaaggatgagtaatttggtaatggtcttgagcattctcaatgtctgagtagtacaggcgctgcgaaaagtcccaatcttcgttttccccaaattgttgatacagcgtttcgctaaagcaatcgtcgaaagcaactatttgaccctacgcacggtgttatgtgttaaccagaatcattcaaacccaaatgaacaactgcatgatgagcaaaaggggtgacattttacccttttaatgacccaattgacacagcgatgaacataaagttttttgtcctttgggtgtctcgttccgccgggggtatctctatggccagggtacttgttgtcatattcctcattctggagaatcccgatgtttgccataatctgacgagagggtccgttgcttttgtcgattgcacggtatactgctccccgcgaaaccagagtctccgcctccctgccacagacaagtaagatgacgttttttaatcgtttcgaggggtgaaagtaccaatctgattgatataaaggctggagctcctggaattcttttttcaagaattgtctcaaagtgggtgactgtgaataccctccaactagcataattttcttggttcattaggcagggttgccccatgattctcaaaaattggcagccttacctgcacaaatcttttcttctctttggatgcaactatttgttcttgaatgagcttcgcgataccattaagactgtcctggaaccagccaaacacttcactcctgaaaataagcagaagttagaacatagcctcagatagattgaaaagccggaagccatgtggggaggacgtcttaccacggtactttaaccctgtttttatagaagcctttagtgtcatctgcctctagaccatgaactatgaagtattcaaacccgtcgaggccttgcgaattgtcaaacactcgtttcagagtgccttcgaaatgcggaagaatgttatgctgaagctgctcttcggctgatatgtttttttgttccaaagattcattgtttctcagcaggtctctgaaatgacgctccatagcatgattcacatacaccgagccaaagttcccacctgtttcaaatgtaagggcttgatattcaacgcgaaattcagacataccggtaggagtggcagcttcactgaatcgaaaagggcttcgagaatcgattgtgtaggtggtgacatcctgtgtagtgttgtaagccttgtaatattttgtcaagagaaagcagcaactaactactgtccctcctccggcatcacacacgataaatgtttctcctgtctataattaatgagtttaagcttccaaatacattattgcgctcttatggtccaatacataccataagggatttcgcaccaacgagctggtcaagagcaaatgccgacgccgcctcgggttcgtttaccaagaacaaatcaaacccttgaccaaaacccacagcttccactgattgtttcaagatctcttgtaggctccaagaagctttgagtggccaaccggccggaacagacagagctagctcaaccttgcttgtgtctttaaagctttcaaactgacctagatgcttcttggtgtgtctgaaaacttcgaccagataatctcgaatcacatcgttcacatctttgcctaatgccttcaaagtttcttcgagatcttcatatggtggggccgccttgttggtttgagaatcggtatatgagccatttgtagaagagccacggttcccttgatgattgtgaccagacagcaagtcagctagaagaagctttgaaaacttaattggcttgttagatgcatccaacgcttcattgggcagaacctcttgggctttcagttgagctccgtagccccagtaaaaatcatcgccgaggtacaagctttcgctggggacctcgcccctattgtgactagaagcagcgttgggccatgcaataactgattttattgcattcttgcttatacctgttgttggtcgtttaccaagcttgaatttatagtatgaaactgaggtcatggtagttccaaagtcaatcccgacgagaaatgtgggatttggcgttcgggggttgccatttgatcgcttcgaaccaggcgaatccactggttgttctccgaccgtcttgttggagcttgaagaggtgatacgttcattatcgtcagatagaatgtcttcgtatcgccgctttcggtagggcatggaccgctttgacgtgggaggcatatttgatcgagtttcgacgaatttccaaaataacccctggaggtagaaattaaggggcctgtccgtacggaaaattctgtgcgggctaattcatagccacagttggcgcttgcgctagcagggatctcgttgtgctgaggttagcatggcgcagctaacatagcacagcctatgaaaccgccctcaccgactattctcgcacattccagtccaacccctggaaactctccttatcttcgtcagctgcatcatcaatctggttttgttgtacatggtggtcacctgaccatcagcccggtgcggcaggcaccaacccccacaactagatagttgggcattctgcccctttaggaatagagaactctctccctctctcattccatcactacactgtagttgcatcgggtttgaattctcaaacatatcaagatgagtctggaagtccagatgccgggggttggatcatcgcgtgcaggatccacgagctctggtctcagactcgcagaacggtggtattatgactccactccacccataccggaccagagtgatcattttccatatctcatgctagacacaaggctccgtcctaggcgagataaacgcagggaggaatcaaatccggcgcctaggcttaagagagagctgtcagacgactcttctacaagttcagcggcggttaagaaccgaagaatactcaaagtttcaacccaagtaggcattaaaatcgattgagtggcaaccattgttaaggaacactgaccaacagtactttagcggctcaggggagccgatcaggcttgcgtcaattcgaccagaatctgtgagacaaatacgagtgcatcagtccccgccaatgttgaaaccccgcatggaaacaccagaaacacggatatacaggacaatccagtttccatcagagagactaaatcagacatgggtcttctgaagcggcagaatgacctgctgaagcgggagatcgacctcataagcatccgccgcgacaggaaaattgtttctttacaggaaaatgtgacctgtctccaagaattcaacaaagaactcaatacaatgctgggccaatacagagaaatgaaggaagttgagacccatgcgtctggggtactggcagatgaagtcatggaactgagagcaaaactcagacaaagagacgagcaattagaaggaaaaatccaccagatttctacacttgacgagcagcttagcgctcatgaggggatgatacaaatcaaggaagattggcgtctcgattttacttgttcctcaagcttctcaaaggctttggctgaactggaaggaaggacccggcgcttagcagacatgcttgcgcaatgtttatcgaggcagaagatctcaaaaatgcgtaaaaagccacgcaaggaaaagttacttcatagcttcgttaaacgcctacttggaacagtgggcgttctggataccaatccaattgaggcgatgcgcgccttaatctttggttttgtgcgagatcggatatttttctctgaatgctggacagctctacactctgagggctatatactgcgagaattacaacagttgatacgaaagacctgtatgtgaccagcatgcctcagaacaagctttggctaacctcactgtttcacccaacatagcccctcctggtaccttggaatcactgcacagagcttctgttgaatcaatgctcaacgatgatcatcagtttaagcattgttggatccaaaaggaagtggaagatacccaaactcagttcctgaggctattctgcccgttgttcgatactcaggtgtttgaagaagtcaagcatcagatcaccagagacttgggaatcgcttttgaaggtgcttttgaagcccgtgctcggttcataccgcctgaggggtctcggtatagactgttacacttcaaggctggggaaaaattcgatcctgcttatatgaagatcgaagaaaccaattcaaaagcaacttctgcaatttcccatcgaggtattcatcggattaaggtatgtgtccacggttgccttattgagcaccccatcaacaaagattcttcttccggagatattcctcaatcactggatcagcctttgattcctgaagacggggggctctgtggcagagaaacagggatcttgaagagcgataaggcaattgtcatattggagaattaaatttatctttgaaaataatgcatataaaacagccttttcatatccttgtcctcgccttggtatctgtataaaacagtctgtgcaagcttcaccaaaagctcgcatcatttgcggactatagagaaccacgcactgcaatgcacagggacggagagcgctcagacggggatgcaaaagtggaaacaattagcatccaccaagaggcgtggtctgagatcgaagaatcgtggcgttgtaatctagctattgttctaatttggaaagccaaaagtcatctagtggatactggctcgaacttcaggaagacatggatggcttaattagctcactgtcaaggttgatggttggcgtctatataggcttgtttttcattgtggcaatcttgctaatattttgtttccccacttagaagggttcggtcgctgattatttttgctcaatttttgaagagatgaaagatgcgaacgtaatgaaaaccctgggtaagtggactctctggacatttaagcttgtcgtgagcaagtatatattgatacgaagagaatctgcgccaatttgctaataaactttataatctataaatctataaagataaccaacctactcttcggtctcgaaaattgaagataatatctaggtattgcagtgggggtttccacagcatgatgactaaggggctatgtgataataaagcacccccgaggcatagatagcaacgaagacacctttccaccttcacttctcaggagtcaccccatggtgttctcctctctagcaccctactactccaagtgacgattctgctctcacacctgtttcgcaggcaggcatgtcgttgaccctgtcccagggtcccctcttcagtagctactaaaagcttggtgttaagaaaagaaagaggcctacctaattattaaggcatgaataacttgtataaccaattttctaggtgagctctagaactgttcaaaggtgagctcattatgatcagctttatagaaatgagctcgttatgagcaatcctctaatctctccatattaaggaagaagaagaatctctgtttcagatgcttaaggattagtcttgcaatcaagatgaattatactgccttagagcctcatttctatcctagttgatgtaatttcatattcaattcatacgtctttcactatcttcttacctggactttaatcctaacaaaagcaagatagtaggttagaatcactaatgaaagctttatattagccaaattcataaacagattagaaacagagctaaaaataggtggttaaggctcaggtagtgaccattaaatggctttgctctagctaggtacctagttgatgttgattagtataaagccaaccttagaaattgccaagtactgagatcgatctggacgccacgaggggtggggcataattatgcacatgtgagcgctttataaaatttatctctcaacatagtttactagctggacgaagaggatttctcaattttcgggaatcaatttcccgagaaagtctggaagtcctgctgcatccatttagaggctatacttaggattcggtgaaaaatagggtatttcaaactgaggaactgaggtattgaccttataaacctgtattcttctaacatccaaggctagctaggtaccaaagggaagaaaactagcagtggccccacttgggcacgtcgagccgttctgttcctaagccctagtgtctctactccgtacgtaagaatttcattcctttcggagtaagtaagtaaaactctttccggtactagtagaaccattttttatcatggtaaaattcttagcgctcataaactaatttcaaatggctccaccgagtgcaatttcccttgttacgccactcggaccctcaaggggtatacgcctcgacttcgctaaatagtagtcctcctgcctcgcccacttgggatacgaaattgctttaatttcgtccattatctaactctcctctatttaggagagcttacccaaatacattgcaatgatagtattgcggacattggcccctactgccgccctagcactggcagttttgctacctctgtccagggcacagcagttcgtcggaaccaatatgtttaccaactatacgggactgagtacagagtgtcaacaggcattggcgacaaatgtgacctgttcaccgtacctaggaatgatctctgagaggtaggtcgatttatagccagatatatggcccctccccttagaacagaaacgctattttagaccaaattactgatgatcgtgcagcaatggtattatgacaacggattagatcgaggccgtatgtgtcgatggctgctatagttctctggaaacagccagaactaccatcgtcagtgaatgtacccttgatacggatatcatcgtggtcgagaacgtggcataccccgctatattctttgtggataattacttattcacatatgagttgtcttgccggaccgacagcaccacgggtcagtactgcgatccgctcgtagcctcatggtcgaatcagtctcttacaacgagccagttgtgctcagactgctggttgggcgggctcgccctagaactggctagtcctttcggatatgatgatgttatggcgcaaaactatgcgtctctgacatccagctgtaatgcgaccacttacagctacgccactccaacgcaatatgcactgaatgtgacggccacgactaaaccagcggccgtcacaaccaccatggcatcgagttgcacgggttcatacgaagtatctgtcggagatacctgcaactcggtggcccaggccctcaatgtgtccacgtacagtctgctctacatgaacaacctggatctatactgcctgaactgggactccacagtggttaatactactctgtgcatcccgccacagtgcgagactcgtgtgtggcagtcgaccgacacatgtgatagcgtggtcagcggcctgtccaatgtcacgattccgcagttcctgacctggaatcccaatttcaatgctctgtgtcagaatgctgtcaactatattgactatgtggtttgcatcgggtgggttgtaatttctcgtcttattcttgtcccctattgactagaacataatatgctgaccatggcccatttttaaagtccccctggaggttatctcaaccacaccaccgacatgacaggtaccgccacagtacagaacccaactaacatcatcacggccgttcctgcacccacaaacgccctcaatggatccaccacagactgtggcctgtggtatacagtacgcttactccttgcccccatgcacctactcattccagttgataataatcgatataggtcggagagggagacacctgcagtctggtcactgttgccaactccatatccctcgtggacttctacttcctcaacccggagatcgatgccaactgcaccaacctcgagcttggagaggcttactgcattgccgctgttggagacatcagcacatactctggctatccagtcacaacccccttatttactgtgaccaccgccagtttccccgccgttgatacgtcgattcccacgaccaccagtgatccgggattcatctacactccaacgtaccttcccacggccccggacacacgtacagactgtgtgcgatacgtcaactatgataacagcacttataacctcaattcttgcaagtggattgcctggctgaatgaggttacaaccgccaacttcctctcctggaaccccagtctcaactcggatctgagcgcgtgtgccatgcaaccggggtatagttattgtgccattctcaatagttcgtacagtgagtatttcttttgcgatcctgcccctctttcgagttcaagtctaaatgcctttctcttcttttcgtgaatatagcaaccggcgatgactacaccaccggcagcgacagcgaggctatcagctcttcacaatgcttgtctcttaatgctaccgagcccagcactgtctcgaactgcaactgctttacggggatctatagctatcaaagtggaggtatggaagaattgggaagagtgaaagataatcgcatacaagcatgctaatcatctctagactatgaatgcgctaatatcgcggatgattttgacatcaccgaggctgaactcatcgcttggaacccctggctggcgaccgactgcgacgcgaatctgtacgcaaacctcgccagtggtgatatgcgtgccgtctgtattggagtgaactccaccgtgtctgcaactaccactaaccccagcactgctagtgctactgctactacatcggcagtaccgacacagactggatatattgatggatgccaggagttctataccgtagagtctggtgacgattgttcgaccatggaggctgaatttggagttacccttgcgcaactttatgcttggaatcctagcagtaagaccccatcccatattgacctctcctgatgtccaggaacctaaggctaacttaaactacagttggaagcacatgtacaggcctctggcttggatatgcctactgtgtaaagggtcccgcggccacagcaagtaccacagctagtgcacccacacagactggcattgtgtccaactgcaacgaatatcacactgttgtttctggggactcgtgtgcggcggttgaaagtgagtacggggtcacctttgcgcagctgtatgagtggaacccggccatcgggtcagactgtgaatatttgaatgttggctatgctatttgtgttggcgtttcataaacacaaagaaagccgttggaggggaaaagaacatgtaagtagatgtaaagaacagaatactattgcctacgtacattcttctctcgtaaatagtagtctaccggttaggatgactacatcttttcccgcttcttcctctctcctcaagaattaaaaccaatagccggtggccgttgatactcgaggtcccaatccgactcattgcgcatagtcgtagaggctacaatctgggctcgatcatagtgaaccttcatccagcccacatcttcccgcgtacagccgtacaatggctcatactcatcatcttcttcctccccctcaggaatttctggggcccaccgcccatttatcatcaccacaaacccagtagtattcaactcgtccaattcatcctccggaatatccaacacggagcgcactgcatcctcatcaaccaagatacaaagccggtatcgggctccatacgcccactccgcacggtcataggttaccccttgctccgtctcacaggccgtcctcgcccactcattaaaagcgtctcgtatctgagcgggtgtcgcttcatcaaactgaatcttatcctcgatcacagtaggccggaacgagtcccacatatcgagaccttcatagtattctagtgtccggcggacctggcccaggaatcggcggaggaactcttcccagtccgagtcgcttttgtaagtggttcggtatattgcgataccccaggacttgaatccgtcatcttgcatgtttatctcgatgaggtcggcttcattgaaggtaactgggtaccctggggttcttttggaatctttgatcaccatagttggtgatgtggacgaaaatggtcgaatgggcaattgaaattggagtgcaagattttgatggggccccctttttttgccggatcgtgctgctgtgttgtgccttggcacgaggatgggttgtccagtagtggatagagataaagagacgatgcttgagagagtcctgcgggcactagattgaaatgcgggtcttttcagaagacttctagccctgatagagatcattgaggacattgcatgatttttgatttagtaggaagtaattcagatataagagtcgggagaatcgcggtttaaaattcaaagtaaacagcgaatggtcctgatgtttagagtctagaccaaacttggatggccatccttcggatttgatatacccctcaatgtgggactggccagttggcagagatccacgtaatgaacaagccactcaactcatctgttcaaatatgcaacctttcctaatttttgagtggaatcgacaacctcatcgcagaattgtgcgagattgaagcatctgagctcacagaggaatcttttcatcacatccgacaggattaacaagcagtcccgcagtgtggccagactaatctctcattcatctccatacaccactcatcctacgccactgctttgccactaaggcgtcaaagcgctacaaattggctatctgcccccaaaatctcgatgtctttggggttcaatgccaatgtctcggcacagcagctggtcgacattttgccagttggaattgccatactcgatcaccactacaaggcaatctccgcgagcagccgtttccaggagctgattccatgccctgaatctgattccgcaaatgctggctacaatcagttaatccagatgatcatgaacgtgcgattgccgcgttgcgagatgcttcggaagatggggaaacgctacgcattgaatatcgcacctccgacccggcatccgtttggtgcgccatgactctagagaagctacagcacacagatgtccagtcctttaggctgaatgaacacggtggattcgtctgtacagtcaccgacataacatccgctaaacgggctgagatcgtagtaatctacgtcaccgccatctgcggcttcttttccacggcgcatcacaaccggacgaggtcgagggcaatttttatttaacgggagtcattgcgctttttgaagtaagcagttacctgattgtttctttcaattaacgtcaggcaggctgtcataagacagagatggacacaagacaaagatagacacaagacaaagatagacacaagacaaagatagacacaagacaaagatagacacaagacaaagatagacacaagacaaagatagacacaagacaaagatagacacaagacaaagatagacacaagacaaagatagacacaagacaaagatagacacaagacaaagatagacacaagacaaagatagacacaagacaaagatagacacaagacaaagatagacacaagacaaagatagacacaagacaaagtgtcatctactaaagccaatcgatacagttgatagcgaaaatggatttaggtctagacaaatcgaaatatggcatagagattcaccgtgctacgtatcggttggcggcaaatgattggcgagtaggtaccccttgtactcggtcgaatccattgtcgatgatattagcccctgctatgcgtgaacgatattattctggtatggcgagagctttgaagtgacaagttgagtttcccttgactaaatttgttctgtcaagaaaaatcttcttaacattttaacagaagacttgcttttccattaagggtgtgatttataaaactgatcaattgttcaaagatgatgtaccattgattcgatgagcggtactccaaagtggagcaaagagtagcagcgtggagccaatcagatgtacaactttatgcaaaaacgggttacccctcagattgagatcccgcatggcttgattcattttgacgacgacctaatattcctaagctctgcatgagtgggcatctgttatgtacctgcgctcttgcaaccgctggttcagagtcatatcgacgacgaagcaaattcgcttgggtgaaccctccccccctccccttcgtcccccataaagcagcatcgtttgaatttatacctcttggttctttgatggtttctttactggggatatcagcgcaagctggggtgtgaacgagtggtttgtatactcgaccgtagtaaatccagtggaattggagctagtcaacctcatcttgaagctttttgatctccaagacccttccagtcgcagccaagccgtcatgtatcgattgaacaggcgcctagagtatgagtgtatcatgcccagaatcctcgcattcatcaggatcatatgatgatcgaacagtatcctcagggcttcgccagtgccgtcgataatagttaccaatgattcattgccgggtatctttcttctcagtctcataaaagcgatggcagtcgagaggcactgaccctcgtgccaattataacagtttgggcaaatgagtatttctatctggtcctcagtaaccataccaattccatttttgatctcattataattaatctttctatcttgggtgtccatacacctacaagatacacgcggcctttgaacaaaattcactcgagatctgctacaagtcagcccttggtataaacattgaccgaagataaacattgttagaccaaagccatttttgagggtggtacgtcttgcactcgagatttcaggtcaattttcctgaagaacttaacccaagatacttaaacacccaaggttcgtctggaaaacgaaagtagaaccaaacttttcaattgaaattctaatggattacgcgaatccgttcgcagattttctagtcgacatctgtggagaactggcagatctacctaaatcttccacttcctccatggctatatacattggctagctaggccggttgtcgacgaaacccgttcttttccctttacgttgaaaatgcgcttttgtgtcacatattggacgaaacgcaacaagcttggctaaatacgtccagaatcagacaacttacaatagttttctctttgtgcgactaccacaacttggtgtaaaagacgccctgcgggcacttaacggcgactgaatgtcgtgcttgtggatcttgatattttgggcattttaaagttgccagaggcttcgcctattcaaccatcttccaatgctcctggccataaaacgatgctactttcactattccctaaggtccagcggtaaagagagcaagtattggacgagaagtgctgttgttgaaactactctaaccttgtgattgtggatacagcgggccagcgcttatattatcccgtccagcgctagaagctttgattggtctggctaggtcccccacttcttcacctcgctgcctggcatgtccggcggcaacatgtttcttctctggaccttactgtcgtttcaagaactcccttttactagaaatcgataggctctcagtctgcttcgattccgctactctcgaagactgagtcttcctatcaccgccgagaccctgcttcacctgtttatctcgatgacgcccgaggggtttgaaggcgaggccggccttcacaattcaagccacaacacagcgaggatcatttccgactctagctttttcagggaacaccaggcgtctacgctccctactccggtatagaggagcctataaagccgaggaatgtatactggcctgcgagtcttttaattctcaattttatgctggaccttcgcgaattgatgctcaaccgaccgggtaaaactgcgaagtacaacgagtaaatcattgtttgaagcatggaggctactcttaagtagccaatgcgcactttctgtacgagaagtagcgagttcgttgaggtgaagatattgtgaagtgtagcaatgaaggaaatgttcttggcagtcgtcgatccattctttttggatgtgttcgagaagagggaggaagaggggaggtgtatatcgctctttgaaatcgctccattgtcggtccttctcttcaaacgtaacggcatatacaactcggtttcaccgctgaagcatcttcttccacccctcttcggctttctcacggtcttcctgggcttcagcgggggtaaggcggtacgaagagttatctccacgggcttctcggcgggcttgtgctacttgatcggcgagaagggggcggggtttcttcaaaatgttcatattaatgtgccaggtgcatgttatatgctttgtatctgggaaaatgaactcaattgcagttagcaaagctgcctctttatccgtgaggattgaacgtggggctgcaagaccaagggcctcgtaggcttccagaagacagccaagcattgccttgtacgtatggtctttctcatctcgcataaatgcaaaagcaaggtggaacgtagagccagtagccgcaaagccaacaacatcaagcagggggaggccatatcggttggtcttacatgtacagtccatggagataaccatgggttcttttgaagcattgagatactctcatacttgaatatcaacttattatttttgggaagttctatcaataacgcttggagaggagtacatccagcaagaaagagctggtgtagcttgcgacgcgtattgtagatatcctgggaatgaggatagtgtcgggatcggtctcacgtagctcggtaagaatctctttgcttgtacggccttgctgaattgcattggctactacagccttcttatgggtaagatcgagagcgcgttggatagggtgaggcgatgctggtgagggctgacggttgtgggtagggatctcaacggtaagatgtcaaagacaagtcccaatgactagccgaacagccatctgaaaggggtatccgaggcgtagtgttgtaattctccggcattttcggggtatgggctcattctcgtcgtcttcattggtattctcctcatgggagcacgcagcttctaagtactgggcacctttagctaatatcggaattcagcacagctcgataacaattaatattcgataatcaatcatcaagaccctagtatctagctactctctacattcactgggactccctgttggttacattacatggcattgaatatgacgacaaatcatctcactaaatcgatattaaataacgaaaacggaggatgtgactaacttggttaaatcaaatttatattacttaatgttagtaataaatatttcgccatctagttggaatgaccttagtggtatgttagaaaaaattggaattggtaaaaaggataaaaataatatggagacgagtattgctataaatgcaataaactaacgcaaggcgaatttatattcgagttactggctatctgacccttttgattaattgtttagatcgtcttggtttagggtaaacgccgttagtatttgaaagtttgcgtttagctgactatctgctataagagctataaggtggttcactcgtaatacattttgtggtactatatagtatttcctgcgtctgagattaatctgttatcgagtaggtgtctggtatactataaaccggatagttattgtctttatatttctttcgattagtttctagtaaaggttaacgaaaagtatattaagagctaagggctataatatacccgcttggctagtttgactatagagagtaatagagtgatcttctattaccttaggcactctgtccttagttactttattatctaggtagggacaattctgtttaaggattcgaggctcttctagatccttataggctagctatagggatagagtagaaatagaattaatatctgtatacttgtctactagggctggaaagcttttattaattaatctctcctagaattctagtatagctataatcttagtatcggtattagaactaagctactctgccttattatagctataatccttactaatataaatcactatagggttagaagctgagcctaaaggagtaggattatctctaatcactataggattagccttagtgcctaacttagaagaattgataagtttatatataactagtataggcctatccgaatgcttattagagtttgatacttcgtaatactaagttagcaaaatctataatactttaagaatatcccttactgaaggtattgtatatattatttataaaagagcttatactaactagaactagaagtagaggtagaaataaatgcttaataattgatatagggtaagactaagggctataattaaaatcaaagacctaatccaattcttaactgttactatcggagaaatagtatataagatatatagctttatatctcttgtctagcggattataccttatttagcctataggctaaagcgggtacctttatctaggtcttaactttagaccgtaaggcctagtaggatcgcttctagataaggcctatctgctaatcgtctctatgtctaatatatattatataggaatactatacgaataaccagcttattatctatttaatctaataatatcacaaagcgctattactatttacggaggactgcactcctacttatcgactgcgcctagtaacgtcgccaccgtttcgattaagctctgtgtgccagtcgttctatagcctaggatagaagacgaaatatgtaagacggacgaatatagagactaaggacccccttatcatccctagtccgcgcgacgtagatactataggagtaaatcctattttcttattagtccacttcgccctctataccacttgatcatgaagctaacgaggatttcggtcatagagcgccttcggtgataggggttaggactgcgaagatctccggaataaggacgaccacgaccccgagataataccataataatgctactattcctggagaactgcaagtacgcgcattgtctgcgcccaatgtcattaccactggattgattgagctctgctcgccagttattccataactcgagacaaaagacaaaacgcggaagagcggaccaacatggagacacacgctacctctatctctagtccgcatgacctgttccttgtccttctatctggtcctctgtgccaatcgatcgtgaagtcaatgagttcggtcataaggcgtccagtcaattgagctttacttgccagtcattccgtaaccaatggctgtgaatgagacgcttatgaggtactgaccgagaaatcaaagctgcctaatcgcctccagtcctatatgtagcttgtgttaaaggattcaccccctgttgttttatccgtccatctcagtatgtctgctaatggataaccacgtcaaaggggtggtcaaggacaaggcgtacttggcgagctgagttctactcgactatttctgaaactagaacgatggtatgaaggatggagaggaactggggcgtgcaaacggtctggggaggtcggcgagcgatttcagagatcattgaagcgcctcaatatggccgctgtggaagcttcatattatgaagagcagggaaaggaggggatcatgttatccagctttagcagacgcttgtatcgttggcttacgtgaattgctgggaggagcgtccggtcgaatatgcaactgatgcgttttaaccgacattcccctcggttcgaaattgattggataccatcagccacaaggctctcagtctcgtactgggccccaaggcagattcacggacccgctgcacataggcgattgtccacagagggcctagggcgactgaaaccaaagggcgcaatggatcgacgacggaccggccgactgacatgtgaggacggatctgccggtcggcgtggcggaccaagggcaaaaatgcctcatcccgagcgtaatggcgagggctgagagggaacggggcagggcggaggaagcagcgctgattgcgctccaggggtcggaggaccgcaaaggactggctagttcacgccggcgatagcggggagtggcggagctcggtgaaccggatcaatggcaaaaatgcctcatctgcaaggctcgcatggcgggcgggtcggggggcgggagaaaggaggagcaggagagccaaaaagttgaaggggcgatgggggaggactttatagaaccacgcacgacgacgcacagggcgctataacgctagaccgaaaaggccagcgctaggcctaataacgtaatttgcggaaggaatttcaagcatccgatatggtgtagtggctaacatcgccgtctctcacacggcagccgggggttcgattccccctatcggagtttctttttgctttttgttctgtttcccttcgctcttgtctttttgattattttctacaggaacgtaatggtaaagaatcgtttacatttcaatttatgcgtgccattgttatcccgtaaggttcctccaatcttaggttcaccgccctcgatatcgcgacaggaccgcaatctggacccttgaactttttggaagatccatggatgtgacgcgatgcctatttgcatcgagtgctcctatccagtctctcacctgtacagcgcctacagtcgtgctgatgaccggtcccaaggcaagggcgtgcgactgacgcaatgtccccggtgccagcggtttgccgataaatacgttgaatatgactttgtcgtgctcttcattgatttggtgctcattaagccccaggtaggcattatacatgttctcggtacgaccaggctgacttatctggaaacaggtataccgacatctcctcttcaatcggctcgggcgagacgacaacaaattcaatgtgggtataccatctcaaacaattgtgagctacgtactgataatgtgacctttcagcggtccatcattcgcctcggagttcttctgcttctcttcgacgtctacctgacctgggcacgcatcgagaaggacccatccctcgcaacaaccttcctgtcacgcgcccctatcatcgtccagtacctcttcttcctaagcttgaatgcagccgcaaccctagctcaccacctcaccgtgcgccttttggcctcaatgctcgttccaaagtcgcgccaatacagcggaccagacagcagcaatgccaacaccaatcctagcacaaagtctactggagatgccaccccttccgctcccccaacgccaacaacgcatccctcgccatccggagtctcaatacacccgcacgcccagaactccgccaacccccccgcaagcctgctaaacccaaacccaaccccaacccctagctcatatagcgaggtcacctccccaacagacctatccccactaccgcaaggtacatcaatgggaccatcacctttacccgcgccgcccctgcgccgggcatcaacagccccgctgcagaacattcagcccctaccccctccaacagccgcaagcccagcagcgatcagcaccgctctgctcgtcagcagctgcgcaaagctcttcccaatcctgctagtaatctggggcgctgacggtagcggcaacctctccgatatcccagcgcacagccatacagcagcacagatccggtccgcgacgcagtcggctatggtttcgagcgcggtgcatcagagcctgttcgccacagccacggaaacgtcttccctgtgcgcgacagcggctatgtcaagtccgccgtcggctgcagttagttcttcttcgtttctggaatcgtggcttggtgtcacggcttcttcgcttcggacttctacgccgactagttatctgacggggctttttgacttgcttgcttcattgctttctcttggtgtggttgatgcgcacctggtgctgctgagtaatatcgaggccttgtatatcttgcttggttgtgggtatttgcgtgctgttgctgttgctgttgcgggccagatcgcccggtgggcggtgcagagggtgattctgggtgctgtgggagttggttaacggagtgattttgatgaatacttaggtacttgatatgaaaactaatttcacctagctttcctagcgtccatgttgcttagggtactctacggcgtaaatcaatcggtcgacctcaccgattagtacatagatatagtcgtaggcagtattggactagtaaaatgacctaaaagggtatgaatgctttccatacaaaaagaaaccggccaactgaacaaaactgaatcaaaacaaaagcatacacataaaacactgccaagaaaaggacatatagggaaagctatacaaaagcatgaagcagctacgaactcacacaggttcgcaatacagaccaagcacacggacagagaacgagaagcagccttcattcccctctaacccaggcgcctcgcagcgcgggatgagatatatctaacatcatcttataatatcccatgacaagaggagacaatatctcacaaccgacagtctccaaagtgtcagttgacagcattgacgaaaaacgcaagaaaccaagggaaatgcctttattgcggtacgcgatcaggtctgatgtctgaccgctttggtgcgatgagagggtgccattgtgagaggaagacgattgctatattgattatgttagtatctacacagatcatagagatatgtggttagagagcatgggtaagaagaaacgtaccccacatcaaataacaagaaacgaaggtaaggatgagcgtgctgcggaagaggctaaggaaagcagagtcagtattctcaattgcttgcaattttgaaaggaagggccgctgggctcgcccagtatgcaaagagggaagcatagactcacgtctgattatcgcccttcgggctcaggaaccacgctgctgtcgagagggcgacaatgataaccaggccaattaacaagctccagctgttgaagtttgtgttagcgactatagtcttttatcgagtagagtatccgggggtcggcgcgtggcgggatagatcgaacaatgcgaacacccttaagcaagtaatcatcgatccattgctcgagatagatatgcattgtttatcccatcactccgacagagggaaaacatacccgtttgccattttgtcggtatttgttattatcttcgttcgtcggagtaaagtacagcccaagtggagatcactcggtatgttatgcgattgtcggtgtgggcgaagagcgggcgagctagggaggagaccgcagaggaggcggatcgtttacttgatggtataaattctgcgcacgagtgctcttgaatgtccggatcttttgacagcgcgggtagacggacaagtaatcgattgctcggtgcagcgtggcacgattaggatcgacttgatggtatttcggggacgtgttcaagaaaccaagtatccgggagtccttcttgggaaagacgtagctgttaggtatgttgcgagctaataaaaggcgacctggtgagttggagtatctccgttgatgtcggagctcctggagctagcatgcctgaggcagaattggcgggcggtggaccatacgacatctatacagcaatgaagacatctgttctactccgtacatttccctacaatatgaaatttatgagaatacatataggagcttcttctaggtccaaaaatacagactgaatgatctgttgcttgggctcagctgaagcaaagcggcttaggtacaaaacacaaggccatggctcgggataacagacaaaatcgaagccggacagaaggataacaaaagaaacatggcattcaaaacaacacttaagcaccctcacggatcttgcggtagctggcctaagaaaaaaaaaaacgtggttagatgtgatagacatgtagaaggagcatcaccgagaacttacctcctgctcgacctgcagtgcatctacggttggagcaagctcactgagaatctcatatgatttcttgtggaactcgagctgagcggcgatcagatcggccaggttgcgcaggggctcgggggtatcaaggaccttgttacaagcaatgtgagtaccactggacagatttcagaacacaaacagaagatcaaccagcacttacatttttcataacgctcacagcctcctcagtctggccaacaaactcatcttcggcctgctcgatctccgcgcgggcatcctcgctcaggttatccaggtcgccgtgggcgccggcctttttgctagccttgatggagtcgagcatcaagcgggcattctcaacattcttgcgcgccttagcagcgaacatcaagttagtgttgagggtggtattccagccggctaggaagcgagactggatctgagcatcctgggctagacgagcctcgcccacctgctcctcggctagagcatacttctccaacgcagtggcgagtgggtcttcgccctcggtgctctgtgcgagtgtctgggagccggcaagggaggcacgggcgatcgcgtggttgaaggtcttgggttggggctttgcggaaggcggggctgtcagggcagcttgtgcctcagcaggcgaagctgcctgggacaggagctggactttctcgctgatcgtgcggcccaggtcattgaaggattcgcggatgtttggagggtagtcgtaggcctcattagagtattgggagctgctcgcgagagatggcaccggttagcaccagtgcggagagccatccacagcgcagaaagcaacaggaattactcacgtcacctgcaacagcttctggtggacaagcttgagcgcatcaacgcgcttctcgagctcgatgtattcatcagggagctgggtcttgtcgtcggcctggcccagctgctccttgatcatttgctgagttcgctgcgcaaaaggtgtgaaactcgcactgtccgtcagaaaaccaaaaggcaagaagatgttagcaaagcgaccaagcacaagtcgagggggatggaatgaggtccgcgggataggggggctatgacggtgtactcacctgaagttctttccgaatgcctgcattcgatccatgattggtatatttttaaacgttttagttagaaagaaaaaggaggagagaatggcgagaaacggatgcgtgtgttgatgggatattaccacatgtgctacgcgggcaggatgaagcctcgaccttgcaccgcctcatttacgccacttctcatcaggcactatcaggcaccttcctttttccacctttatactagacattgaaatccatgtcaaatccatgtttcctctaaaagcagccctctgtaagtatcgagtgtttggaatttcaatattgtacttggagatggtctgcaaattgctaaaagatacatagagaacatccggaaatccccattcagaacccagaaccactgagtcaaattaaaatcataacatcgtaactcgctggttcaaaagcaaagcatgaaagcatgaaagcattacgcaaattaggttaggtcagagtggccatcatagcacgcatgatgcgggagttgggttctagagaatgtcagaatcaccgaaggggtatgtatagtaatctgtggcgtcgtacctgagcgctcctgcctccggacctcagtaacctcctcctggttgcctctttcgtcaatgatatctgtttcgcgttgccgagtgatctcaatcccaccctgcctctctatacgaagaagtcttgtctcctcttccagattgcgaatgtactcattcacgtcgtcatcgctgtcccgtggacgaacgacaaccatcgagctcgtacgaggactatccaattcccgctcttcgatgtactcaacgggagacaagatacggggtccgcggtcatggactgatacagctcgtcgccgagagatccctcgcctgcgcggcctctcgacaatctcctcgtactcatctgcatagtggcgtgaccgtgacctgtgtcgggagggtgatgcttccacgatgaatgcctggctcgtgcggggagaagcatcaacacgcaagtgttctgtcgtcacccgctcgcgtgtacgttcccttagcggaggagacggagcaaattcgacatattcggctgttcgaaaaaaaaggccaattagtatgatcttcctcatacacttggggatccggatacgcatgtatatgccactcaccttccacggacggaggccgcctgaactcgcggctcaagctaagaacttcgtcgatttgttccttcgacaatgccttttgaatgacgatcacatcatcctacctaggtcagcagccgacaacagcactatcggaaatcaaacaccaacctcttccttgaacgggtaccctagatccatgatggcgtgaatatgagcaaggtgacgaggaacacgggtcttccctttgcgtgggtaaggtttctcctcatgatgtctgcgaagggtactgctagaccggcggcgacgatcaaccatatctcgctcactgatatctctaaattcttcatcaccatagtagtcgggttcggcgatccttatatcttcgtagacttcccgttcgcgataacggcccggagaggggaggtgacgaggcggagcaacgagaggtacacggggagcgcggggtccaacatctcgggcatcaaagtgttccatattgcgccttggtatgcggtcaaaggtatccaaagacgactgccgcctaagaagttgaggacgactgaatgagggactatcgtcaccgcgccgacgccggtcatgcgccacaagagacatggaaggcggttggtgatctagatggtcatcctcatagagtctcccgggtgcacgagcagggggtccatatcgatcttcctcgtggaggcgtgattcaaagcgctcttcgacatggcggggtcgttcggccacgggggggccccgtgagtatcgatcatatcgatcgcgagagttcagtgtccccgttgacgagcggtagtcatcatagcgagacatctgagaaaacacagcaaggatgaaccgtggatgacgcgagcggctgacttccgtgccgagggtggggtaattcgagtaaccacgggtgaagagagacctcgtgagaatgataggaagagagagaaagatagaaatgagccgagaggcagcaatgaggagagagaaactgaaaacagaaatcaagaatcagccttgggagagaagaagaagtaagataaataaaacgtcaggcagaagtcgatcagtgatgacattgggtcggatgttgattgcatgtggggatacccggacacctatttgcgccacatgtttggacaaagtacgggcactactgtatgatgcgactgtatgttgcgcttcatgtatgtactatgtatgtagacacggatgcattgtgtagttgatccaatcctaaagctccaaattcgcaatgtcctcttccaagatgcccatagcccaatgcgctcggtccgacttgactggcacaaaccgacgatcttttacctcatgcagcaccgcctcagactgtggcgcatacattagcttggatgttgagggccaaggatatccaatagatgtactcacctgacgctcctgttccctttcccgatctcggtcagtcttgaatgactgttgatagggtggcccacggccttgcttggcagcggctatccaagctttctcacagccaccggcgatagcgtctgcgctcttccacccggtcaggcgggagatgtcacgaagtgttgaaatcgtccaagctcgctgcgtgggatcactatattgcacagctgcgaagaatagcggcaccgacatgtcagtcaacgaagagcccagattcggattcaagcttccggcttcgaggttaaaacgttgcgggtagtagacacccgccagaatcttcccaacaatctgcgaaaattcagctgtcgtgggagcagagactccagctgcgaccatgatagccggtggcatagaaggatgaatccggttcagcagcaggcgcatggcataatagaacccccagatcacggcgatggtatgggtacggtattggagggcaggaccgaacggtgtagatattgggggcgcgacgtctgttggtaaaggctggaaatcgcggcccagcgcttggtatagtatttccatggcgacgaggatctcttcccattcttgttcggcttcgttgtaactcacgtcgtgagcggggtcatcctcgtccggtgacaaacgaggctcacgcggtgtatcttcgaatccccggggaagacgtgcaggcggttgagggggtatcattccgtacatggggggactaggggccgaggtcgatccagggcttgaagaaggagacatctcagtaggtgggccaggtggagggccaggtggagggccaggtggacggccaggtggaccccctggaccgagtccgccagatgagccaggtctttggccgggagggccgccagcgaaccgacccatgaatttaaacatcccaggacctggcctccagttcaccccgcctgccttcagggttctcaattttcgcttacggtcacggaagccaaagtctgtgacccgagcgagcagcagccacagatgatctgcggagccgtatatggcatctaaacggccaatacctgctcgaggtgggcattggccccattgagagtaaggcattctggtttaccgatgagaaaatcgcctgtctagtagccaaaggtgtagacttacaataatttgtttccgccgataaaactctggaatgcatcttgcttcgcgtaccaccagtatagatcgcattgaatccggaaaacctcaatgtccttgcgggtgaaatgcttcttggagggcagcgtaccctcttcattgatacctccaaaatcgtcgtaattcactgcttgtcccataatggcgcctatgagatcttcgtcgatgctttcctctttctcggagaagggatcgtcttcagagacaccagacagcccccaccacgagttcgaccagcctgactggcgtcgctgctcgtgagatctacgtcgataggcccgtaggtctctcgtggtcttggcgaaatcgatctctcggatcaaatgggtggacccacccaggtggttattccatttcgagtggtcggcagatatcacctcatagtagcccagtagaagagtggcagccaaggtaccgacttgtttgcgtcggagaggaagaccaactgcggaactaactcgtttcagggcgtagtgatagtgcttcaaagatactgtcgtgggagcttgctgtaaataggcaatgtgtaagctgctgacagccagtattgcctgtaggagagctggatgctctaaagctttgagggcaagcgtatagacccatagaccctgctgtgcagatgggacagccgctcccagaacaattgaggagtcagtaggatgccgttcaaatatagacaaggatggaccagtcgaatgaatgaagtgagcaaagatgcgggcagtctttgggttgttcagcggagaagagccaagtgtaggacggtatgaggcaagcacattgggctcgttcaggtgagtcgtgaaggatcgaagttgttgctcgtcgcggttagcagaggccataatgagactcagctggttgaagccttcggcctgcgattgatccaccatctcatcatccgagtccacgtcgtagtaatcctcgctttcatcctccatgtatatcatttgttgttgatggggtatttgatagggtatatattgctcatgagatcgtaattgctgcggtaattgccccagcggtggctgataatgatatatcgtcggtagcggctgggtcatctaagaaatcgtactcagcataccagttgctaaagacagagataatgacaatacatacctgaggaactaggttggtctcgctctccctccttccatgcatcgagctggaagctagcatgggcgagagattggaggcgtattcttcagctgtctggccgatcggactggcgatctggggtacattttgtacgcttgcatgggaagtatgtagagcgcttgtctggtctaactgaactgattgctgtccttgcgagaagtcagtcacatttggcggaactagcgtgttttccgtttgagctatcggctggatgtgccacatatggctcggtggctgcacatgagctggataatagaaggagggtgtattaatgggctgtagttgagccgacgaatgcatttgggacggaaatgagggatatcccatcacggctggatcagcaggtcgaggggctagcattggatgctgagcagcagctgccgcttgttggggagggagttcagagccatagtcgttgggcatcggccccctcatatgttgttggtctatctgcaaatcgtggctgtggccattattgaatgatccgaagaggcctatggggttcttgaacacgacccgctgggcatatccctcgcagattcgcttggatttcacgcagttggtacatattggcttctcttcgccgcacttaatccggcgctttcgacaagctatgcttcgtcaatgagggaaccctatcaccagtgttctgcaacatactcaaacagccagtcttggttcgttttttcgggagtctgcggggaccttgtccggttgaggttcccgcagaaccgccaacagtaagatctgctggaatatccagctgatccttcaggtcgtcagccataaccttggaaggactcaagattgcggagtggacatgtgcgaggacattgtggggctaaaagacacaataatcagataagtaagaaacagagctaggagggaaaagctgccgagcaacgcagatcacccgcgatacaatgtggttcatcaaggggggatatacatatttgcaaggttgctcttaacacggtcagactgctaagtgtccacggatattgacatttataattacaacttacgagacgcttaggggcgtacaacgttgtctttgtggcccaagaaagtcacactatcggcatacatcagtgcctgaggcaccaatgtgtatgtaatctgatagtaaaattaccgataacgaaattttgagagtttttttttggaggtaccgtttcccctaccttaaaaggcattggacatttacaaccaatccttcggaactaactatgttcgctgttccaggatggtccgtggagagctctgctctgaagtcacagactcaagccgcacagcctaagaacgactctcagccggagaagaatgcctccaacgatgcgaagaacaataaacgcaagcgtgccaatgaccgtatcactgcgggaaatgtggatgagatgtaccgtagacacatcgagggtaccttcaggagtggaaagcatggtgcagatgattctgtgaagccagagaagaagcagaacaaggaaaagaaacagaaacagacacttgagactgccacccaggagactacaagtgaaactgccaccaccgccgatgccgatgccgatgcagatcaagccgaggataaagcacccaagaagaagcaaaggaggaacaggaagaacaaggacaacaaggacaacgcagaggacaagatcgaggcagacggcgctaccactaccccagctaaagaagctcctgccgctgctcctgctcctgctcccgctgcacccgcactcccaccaacatcgaacctgactcctctccagcaggcgatgcgacaaaagctgatctcctctcggttccgccacctgaacgaaactctctacaccaccccctccgcgaaagcacttgaaatgttcagtaccaacccggagctgttcgacgagtatcatgccggattcgcacgacaggtgaaagagtcctggccctccaacccggtcgatgactacatcaagactatccgcacccgcggtgcaatccccctcccaaggcgaggaaatcccattaaccctgctaagggctacccgctccctcgtcgtcctactggactatgcacattcgccgatctgggctgcggtgatgcacaacttgcgcgcgccttgacgccctccgccaagaagctgaaaatcaagcttaacagctacgatctagcagcgcccgatccactgatcaccaaagccgatatctcgaatcttcctttggaagatggggcggcggatgtggctattttctgtctaagtctgatgggaaccaactgggtttcgttcgtcgaggaggcatggcgtattttgcgtggtgatggcaagggcgagtgctgggtcagtgaggtcaaaagtcgatttggaaaggtccaacgcaagaagtctcagatcggtgcgatgaagcccggcagcaaggcagacaagaagaagcccaagaagaagggcggcgccgattctgatgacgatgaggctgatatttttgctgaggatgcgcgaccgtctgacaatagcgatgagactgatatctcggcgtttgtggaggtgttccggtctcgtgggttcatgcttcgccaggaatccgtggataagtccaataagatgttcgtgagaatggtgtttgttaagcagggtggtgcgcctaccaagggtaaacacgcttcggctctcactgcgcctgcccctggtaacaagaagcgctttgtcgaccgcaagcctgattcagagtctggcatgtcggccgaacaggaagcccaggtgctgaagccttgtgtttataagatccgctagacgttgcaccggatctttttatatgtcattgtacataaccaaaatctaccacacatgaccactatgtttgtggatcatatcccgaatgcaacatacgacgtagttagaccagcatgtaagcgttggatggcatcgtcattatttttctattgctcccgacataaatactagcctccaaatcaagtccaaggagcctcttcgaagatatcttagacactgatcgcccttattggttcccaccgagctgtgtgacagcttggcccatctcctcatcgttgtagatacggaaacccttctccttggtgacactggccaactggacgttcttggaatcaagcttctcctccatgacctgcttcagtgtcttgagtaccaacgtctcggcctctgctagagtcaaagaccgatgatattcattctgcagctccgcctgcgcaccttcgcttcccgagccgatggccttggcatcataccggtagaatgtgccggacggttcagcgtggtatctagcagaaaagatgagtcagtgaatatatcatacaaaagaaagctgcatatcttacagttggggcccgtcctcgtcataaccagcgattaacagcgcaacaccaaacggtctgctcatgacactctcctcgtcatcaccgctctcaccaaatcgcagagccaaatcgcaaattgcctgcgtagtgctctcgacccgcagaggctcggcatagtggaaggcgtggttttggcactcgactcgggcgtgctcgactaggttgcgggcatcggcttgcagaccggacatggcacagccgatgtgctggtcaatttcaacgatcttctcgacggacgacgcttcgagcagcgtggatgtgacgcgcttctcaacaccgagaatcacgccctcggaggttgctacctagatgagtattagaaaaaacggtttcataatcgcattatcctgggtcttgcgctccgataacagtacaaagatcactcggtgtagtggtttgaggactttcttgaaatcgtagagcaaagaggaactgagttgtatgacatactccgatcgcggtggagcctagtttgatagcttcaagagagtattcgacctggaacaaacgaccttcgggggagaaggtgctgcggaggggacattgtcagactgcgggtcggtataagagcgcggattgttatcggagaacgtacttgattccacggtctgtccatagctgttagttgattccgcggtgaggggagaccctgatgaagcttaccatattctgatcgtgcaatgaacatattggattatctgatgggatgggagagacttgtcaaaaagagaagcaatgaagcaatatagaatcacgatggaggagataatcagttggaacgaaagaggagcagaggtggatgtcttaagtgaagctcgggaagggaagctctcgacgtacgcaagaggtgaggtgcctggttgatgcctttgtgcctgaggcaattatcggcccaaaccaaatgtggagttgtttggatacttgcatcttctcctcatatacattggttctgctatttttgttgctgatttttcgatctcgcgcctttcagtcgcctatgctgcatgattcaattgtcgccctcgcgggattatgtctgccaatgaccgcgccgcgtatatgaacgcttcacgaccccgcgcggtctccaatcgcgtcgattccgaaactcgcggagcatcgccgttacagatcgagaataaggatcccttgcgccgcagcagctcaaatcaaaaacacagagcatcccgagatcagaagagcatggccgataagcgctcagaacgcatggtaatcacatcacgggaaagggcagtgcgaaggaaccctgtgaaccctgttaaggaatctatcaatgcggctagcaggggcgattgggataaaactcggcccaggaagcctgtccaacttgatgacgggaattccagtttccgaactggggagaaagacctggctgattgtgagtgctgcgtcgcagtttctcgtggagtgcaatggatttgctgaccatgatttttctctttacagcaccatggaatccccaagcatcattgattcctcactcgacagctcccctcgcatgtcgtgtatcagttcctcctctagcttcgacggctccgcaggcccttcatcctcggccacttcgagagctctcacccgatgcccaggaggcggcgatcttggaagacttgttgttcgtgttcatgggattcgaaggtcaatatgttcactacgctagctcatacgacccatcaatcgagaaagaccgcctcacgggcccgatcttccagatagccccaggcctggacccgaccctccgtgatctcatccagtccatgttgaaaatggctactcactacagtgccatggaggcatttgtggaaattcaaagtcgcgctgagtgtggtgctgtcagtcactcactatgcgcatctattcgaaagctcctcaaagattacctgatccttatcgcccagctcgaaggccagctgctgaacaatcctacatttaccttacaccttctccatctctacacaatgcctaccagtcaatgtttatctcaattatattcgatgggccaggaactgttgctcaaaaatggtcttctagatgaggagctcgaggagtcgactgatgacttcgatgaggatgttgacaatatacttgaacaactcaaagaagggggggacttagtgccaggttctatggcccgcaagaaaatgtgcaaaggaggcaatattctcggactcctaacagggcgtctggcttcattctcgggtgatccgatcactaaaaccttgcttcagaccttactgcgtgacgccagtcggccttacatggctatgctaaacgaatggttgcaccatggcggtattagagatccccatgccgagttcttggtcaaggaacaaaaatggatcaaacgcgagaaactcgaggaagactacacggatgaatattgggagaaacgctacacgattcgagagaacgaggttcctcctcagctgaagagcgtgcaggataaagttctgctggctggaaagtatctcaacgtggtgcgtgaatgtggtggtgtcgacgtcagcaaagaggtcaaagatgtaccgaagacgctcgacgatccacgcttcttggacaacgtaaattctgcctacacctatgccaatgcttccctgttaaatcttcttgtcacaaaaaactccctcactactcgattccgctccctgaaacattacttcttcctcgatcgctctgattttttttcctacttcctcgagcttggtgcttccgagctacgaaaaccggcacgtgccgtcaacgaagggaagctgcagtcactgttggatattgtccttcgacagcctggcagcgttgcagcactggacccgttcaaggaggatgtcaaggtgcggatgaacaagatcggcctcacgaaatggttgatgcaggttgtgaatgtttcaggcgtcaaccaagagggcgcggaagcggagaagcaacaaggttctgctgtccattccgctgatgaggacaaagatattcttggattcgatgcgcttgagctggactattcagttccattccccctatcactggtaattagccgtaaaaccgttctgcggtaccaacttattttccgccatcttctctcgctgcgccatctcgagacgttgttggtcacgtcctgggcagaccagaacaaaaccatcagctggcggcataaatcctccgatcgacggcttgaaatatggaaacggcgggcgtggaacttgcgcgcgaagatgttggtgtttgttcagcagcttttgtacttttgcacggctgaggtcattgagcccaattgggtgggtctgatggatcgtgtcaacagcgttgacgccgacgcgtcggaggtggaggaaaattatatgaagcaggtcaatcgaacggttgatgagctgatgcaagatcatgtggatttcttggatacctgtttgaaggagtgcatgctcacacaggctaaactgttgaaggtacgtttatccatgcaggcggtggtattcatactaatagctatatagatccattcgaaactggtgacttgctgcaccatgtttgcttcctggactgcggcatcactttcacgcgccttggcttcagccgatcctgacttggctggaggaaaagtccctggcgctgatgccagaggatatgatccaacgcggattggaaaactcgaggacacactgaaacgatacgaggaccatttctcgcgccatctccgcattttgatggacaggtgagttacacccttaagaaatacatctggttatgtgttctaacacgactatacagcttgaactacttcgccgcaacggagagtgtggtgctcctgaagcttgcacattctttgacctctattagccgagaggagagtaaagaggattgaaagcttgcaatgccttgctccgtgtctttcacaccttgatatcattatccccatatcaacccccgacagagatgcggttgagtgctctggttatgggcacaagaagcaaagcgcttcagacccataatgcttgctcgctgccgcctagaacttggtgatgccgagacatatgccacggacttcggattgtggattttcgaactccgcagaattgagacattcaccggactctcccagacaagtccaaatgggctgtatcacactctatcaagcctcgtctgtgggttcgtggaaacccagatcactgtacttagagccatgaaccgagtcacaccagacatcgggattaatgataatacgagtagcatttcggaacgaaacccggacttacagcgtgaagtgaagtgtataacgaaatctcccaaatgacggagcccgcaaattcctcgggatcgcgtcagcaagcggcttctcacgtcagccggatttggccatccaagaccgtcagggttcttattatttaatttcaatggaatctctgagatatttgtaaccaaagagaaataattaaacacctacgggactccaacaaagccgatcgacgcaaacaccacaaacatgccaataaccaccctcacctccgtcctccgcatcccattcccgcaccccaacacagcacaagaccgcctaactttggccctcggcgccacagcgctagtcctctcgaccctcgtcctccccgccgcctaccgcgactacaaaatcttcaaatcctacggaccgggcgggccaccgaacaacgcgctaggatgggtaatcgtgcgcgcgctgttccagccattcgggcgcgaaatgttcagcacggacgagtacgtgaaacgcgttgcggcagccgatggccacgggaagggcgatgatgggtttctgtttttgtccgaggagcaactggggagtcgacggggggaagagaggcctgttgttggaccgcacgttgcaccgcagaggcagttgacgcaggtaccagataatgctgttatggaggtatgttgcgtgccccctttttttgatcagaaaagagaaggcgagggatgaagagctacttgctgattatgctcttgtgtgatagaaattccgtgctgtgttcagcgccttcggacatcggaaccatcacctcgtgaaattccaaaagtccaatctggaacgccatgctgatgggctctttgtcgcggatcatcttcctgtattcggaattgcgaaaactatggagcgggagattgcacatgttcatactggaaatgaccactcggttcatgtgattcttgcgccagctgattgtatgattttctcgattcattcatttgttcgcgtgctaacattccttaggtatcaaggttatcgaggctggttggggccagcgtcatgctttctcgggtacatctgcgatctcgtttctttcgcttggtacaaggcctgatatcccggtggagtatgttttgatatatgcgccgcggacggaagcggagattgagacggttatgcagattatctcagcgggtgtcgagtttatgacggggagagaggatgtgcggtaggtcaacgagtgttttttggactgatcgtatacttgaagggagtaatggtggtgttctaaggtggatgcattcttcttccggtgtatgggttgtgcttggtttcttcctgttctctgtctagctttatataccctcactcttcgatttatagaaattcatgctgtttatatgagcatgtggcagcgccattgcttttaattgagactagtacattctgctgttggtgatgcatgtataagctgatgcctcaactctctctatggtatactcactccagcccaagagtgacctgcaataatgtaccttctttgccctggatgagtgctgacttagagaactaaaggtgaacacgttctttcccttttgatataatctaacctttctcatggcctatctagcttctatacaatttctcaatgtacatggtgcaaatagaaaacggaatcccccgcctctccacttttgcaagctagtagtagataaccatgtaaggcctctttgcttctgcattcgaggcgtttagaattaatcattggggcgaatgccctggaatggctctatggatatggcattgtatcatctactattgttattttggtggtaggagtatctggatatatatttgtcatatttgttatgtacactatagttatgattagatagtgaatattatgtgtagttctataccgaggaatctgccgaccgtcatgcgatattaggactatatttaacgtttttctctcctctgtgctagtatcttaaatagtaccacggcgacgcctctacccaagtggatctatagcgcgattgcacgcatatggctagtggaaccgagggagtggtcaagttcgtatttagtaggtaagaaaatacacatatccacccagcaaatgagactacgaatgataattatcttttctttcattttactactccatacgtatcattgtaaaaggaaatgtgcttggcggttgtcatgcccaatttagaatggggcaatgaacccgctaggagcaattccaaaattacccgttatttcccgacttacatccgacgtaggttccgatactttttttggggtttcggaaaaaggaaataggggggacctttgaagtacaggaatgatattgatctaagagctcccccaggttgaagccgaaaaagttagtaggtggctcccttacccgagagatgaaccatggcgctgggttttgagccaacggcggagccggacgggtaagcccttgtcgaaatcccgacagtatggatcttcgtatattgtactttgtatatgtaggaatctttcttccttgcttcgacctgaagagtctttttgacacgaacttaaatagtgctcggaccacatattcttgtatggacccgaggtataagcggcacttgcatggaagtaacgcgttgacatgtcgtcatgtaactcagtgttatgtgagaaataaccacatgcaagtcttcggaatataccccacgaccgcaactgcaactacaacatacgaaccttgcctttgttatggaccgttgctgctgccatgtgggacccgatcgcctcggataattgacctagagtgaagaaaagctagcagtacctgcacttaggcattaggccagttgaaaataatttcgaagatgttttctctcggtgaactcggacaccgaagtggatattgccgacgttgttgtgttgtgttgtatgttgtatgctgtaatgtaatattgcatactccgtatcttctcctaaaggcaacaaatatccacacacgggatgggtatctttcccgctgcccatcactcgctttgcaccaaggcaaacaaggtgaacgggtgaagaatccagaagagggcaacggtaatatcgatcccttgcctcggaggtacttctgtcatattgttctgcagaatctggagacgggctaaaaaatccctgtagcaaatctccatagtgtccgccacccgggccaacaacgttgcaatcttgaaacgcaaagcctccagacaagcggtgagagcgagagtgaaataagaggggcaggaataaaatcaataaaatccagtgtccagcccatctgaatcccgagggaatggatgccataacgaggaagttgctgatctcgtctgtcgaaccccactcaatttgaggggctgttgttggggcaatttggggcgtgagattggactgaaccagccactttacacccacagtactgcacattgggccaaggacacggggcgtggcgagtgtcagaaacccgtcaagccgttcgatccaactgttggattccttgtttgcattccttcacttaagtgacagcgggaaccgacggtgatccgtttccatgcctttggaatccgtgatgtagggctcatttggcctgtacaaagtacatacgcaagggctggtgtgaactccgatcccacgggcttttctttttgtccttgttctcagtcggctctctcagagccaattcctaaaccttttgttctccgtatggtgtctcatgtcgcactgcggctgtgttgtcattgtttcaacctaacgacgaattgttgcatagtttgcttcaatcgatgggtggctttttttttcattcttcaccgagttcttgttacattcttcgctagtcaacccctagagacccatggaatcatggcgagcagcctgagcaaggtgcgattcaactttctgtagactcgaagtttccaaggttaaccgctcatgacagccgcggaattacccacatattacccaccatgtttagcaatgcaacgattctttgacggcatggagatcccagtcttatgggtttagttgtggccggatttgtactcgatccacatcgtcgggcgctcttggaccctccaggaaagtaggtactatgcgagacggcgaactgtgcattagttgacggcaccgccacctagtttcaaggttcgttagcttggctttgagcggaaccaagtcatgtctattctgatacttacctattctggtgtcaatagtccgggattattcgtgaactcttcggctagtctaccgacccgcattttttttctttcgtcaagccttgttgacgtaccagtgtcccggagcagcaacaagagcctcccgtgaagatgtctcacgccatgtttagtagttccgctagcaaggatgtgtgttttggagttggccccaaggaacgacatgaacgatccggaggggagttgggagtccgcattgatcgtatttggttacccatgcaggacccatccgtgccaaatcttcgcccgttaagcacctcgtgtcttcacaaatccagtattgcatctggtgtgatctttaaaagaggaaattcgattgggtggaccgctggccctcccatccgcacaatttggtacgtcccttgtataattagaagcccctccattcagccttcgcgagcagacgcccaagagcgaataatcctcgcgcgagccgccatcctctccgagggtaccgccgacgtcttcaagcggcacccgatcgctccaatgaaaaccccagcacatcaatgatcaaatctcactcctttttcggatattgtgattcgaagcaagatcttgtcctcgggcaattcaaccccgccttggccagacaaatcaggatatatcagctcggatttttccatcatccacaacaccactcgattcagggtgacgatggcgtatgctagttctctccgttctttcgggccaagggcaactgacgttcatggccgccaggagtcccgattctgaaacgatagagttagaccgtgaatacctcgatacggtcacagtccagggccgtgagtatcagaaatattcgatcgatcatcgtacgtactttggaccggtcgatgaggtaagtcgtccagatttatgtcgtgggcttctcactgataggctgaaccaggaagaagcacaacgactcgaagaccagcaacaagttttccaaagaattttcgataatcgtttgatcttccccccaatccatcgactgaaaagagttctggactgtggacatggatccgcatcctgggctgtggatgttgctgagcaaaaccctgactgtgaagtaagatgtccccttgactgcgcccgacgacatcctaatatttggtgtttcataggtcatcggcgtagacattgcccctcacatgagtccagacgacatgcctgacaacttatggctccaggtaagtcaacctcacatttcaccacggggtacggtgtggtttacatcatgaaaaggcttgacactgcctttgactcatgactttgtgcttcgggacctctgtgtgatctgtcaatcttgaacaacagttctgtccaaatgtgtaacctcctgaaagacattcgctgacttgtgccgaataggtcgatgacttgaaccgccgtttcacctttcctgcaaaccatttcgatcttgtccactctagactccttgcgaccggtatcaaccgatcgcgatggccatcctatcttcttgacatagtcaggtgcgaatactccagagcaggttgaccttgccgacattccaagaggcagaatttctccaactgagataccaagactaacgtcagcggtaatcaagggtactgaagccaggaggctgggtccaaatggtggaaatatacttcaatgttcaatcagacaacggctcaatcactgatgagcatgctttgaggagatggagcacaaaatacatgcgtgctctggaggacaggaaagatcttcggatcggatcgaagctgaggactcttatgaccgaggcggggttcgtcgaggtagacacgaagatgattcctcttcctctgtctgcgtggtcgactggtcggtattggctacccaagaagaacgaataagactgattgaatcaatgcagaccaacggatgcgagaaatcggccgatacaattgtccgaacatgcagcaacttctgcgatcacttgcactatatccattgactcaacgcttgcatatgtctccagatgctttcaattctttggtggaccaagcgcagcaagaagcagcagaccccacactgaaggcatatttcccactgtaggtattgctccaatatgaaactgagagacaaattctgacagagtaggtatgtttgcattggcaggaagccatgaagacatctgtctggggagatcggcaggtgcaatggctcataaaagcaacctctggcggaagggggaaaaatgctcgcaagacaactgggccggttatcgatgccacccctcacccagcatatcgtacagctttggttattttgctgtgcgcatcctgcattaacatgtcgcattagcggaaagatggttagttgaatgagtgttttctaattccacctgttctttccttttgccgtttgtaatgcaacggggattcgtatcaataaccgtcgctgtatgctggctgaagtccagcggagagcttgagaatctcggtatgattcatcgaaagaggactgcatggtcgcacaagaacgagtgagacgactccacggcgagtggagtgagagaaagctcgtagtccaccgtggtttctgcgggaagccaacaattcgcacatgcatcgagtcttggctttaagagcctcgtatccactcgatatcggtgttggggtactgcccaacgcggtgggaaagcgaaggtgtattggatggaacacggggtcgaggcatcgctaccgctgcctagggtaagttgagcttttagttgactgctcccaggcaaaatgggagtgaaacgaaacaggagagggttttgagcaggaggcctgggggtgcagattaagctgttgagatcgtgcctagtgcgggatacccgacaccgttggctcccgatccgaccttaccctttagagaagggggttttcgacctccttacactccaaaagatacacccgatcagcaaagtttgtcacgacaaaagatgaagaacatagaggaagatgaaacaggaggggacttaccgaactgacgggagagccagggaaccaccgacttccaggaacacatgatttacacccatctcagacagtatatacggtttgactgacctcaatatcaatactagctgttaaaaatgtccataccgacttgacaattagacagcttcgcgccgtcacgccatcacgctctcaggccttcggagcagactctcatgttgagagtgataaccctgggcgacgagctccctcaagccttaatgaacatccacaacatccgttacacattaaagagctatcaatcttgtgtcttaccgatattctcaatggccgcaggagctcttataaccaacaccctcttcaccgtgtttcccgtacggatgtacccaatcataacctccaagcaaccaacaactaggaatctaagctgcatatcgggatctaactagcgctgaatccttgctgatttgttgagttccttctttccttactcgcgaagcggccatgtcgccctcttagcttcttattagagttcctcccggatgcccctggcgacgctagctcgaggagttgcggtatgttgattgccggaaagacccacagaagctcgaaatgcataagctacattctcttctcttcatgagtgtgttggggagccttgaggcgactattgggcacagatctaccgagaatcttacctatcgcagtccttccaagattctgattggtctcctccaggggctctaaggccaaatcaaccatgaaggggagaatccagactagacagcttgcagtttcgattagtaccatcaactagggaatattggtgcttggaaagactgtactagtcgatttatgccgaagacttttcttttgtctgatattcttttgtttgtctttcctgtacggagtacctgagaccaaattacccctactatatgccgataatgagtgaccaccaacttaaactactcttaaccatcgttgtaatccttatacatactccgtacgcagcagaaattagcgtacagctagctaagaggaagatactcaggcttggccccgatctagatgtgttggtgcctgaacttcaaggcatgaaatcctacccaatcggggaaagcggggagaaaaaaaagttggcgcggattttcatttgagctccggaacagtcgcccattctttttcctatcaagtcaccaccaacaagatgccttcaacacacaataaggaaaaggcctgggatacggatgacatcgataagtggaaggtaagtccaaagctgtccttcttcgattaaaaaatcgctactgacggatcctcgcaacagatcgaagaattcaaacccgaacacaatgccggaggcagtttcgccgaggagtcatccttcatgacactattccccaaataccgtgaacagtacttgaaggaagcatggccggtgatcacacgagcgctggagaagcagggcatcgcctgcacactggatttggtcgagggtagcatgacagtgaagacgacgcgaaagacctacgacccagcagcgatcatcaaatcccgggatctgatcaagctgcttgcacgaagcgtacccgtgacacaagcgatgaagatcctcgaagacggcgtggcatgcgacgtgatcaagatccgcaaccaggtgcggaacaaagagcgattcgtgaagcggcgacagcgcattctcggcccgaacggttcaaccctcaaagcgctcgagctgctcaccggcacatacatcctggtgcagggtaacaccgtggctgtgatgggtccgttcaagggactgaaggaggtgcgacgcattatcgacgactgtatggcgaacatccacccgatctaccacatcaaggagttgatgatcaagcgtgagctcgccaaggacccgacgctggcggaagagtcctgggaccggtttttgcctaacttcaagaaacgcacgctgtccaagcgccatgtgccattcaagatcaccgacaaggagaagaagacgtacacgccgttcccccctgcgccggagaagagcaaggtcgatttacagatcgagtctggagagtacttcttgtcaaaggaggccaaggagcgcgttcacaaggaggaggttgtcgagcgacagcgtctcaagcgggacgagaagatgcgcgagcgcgagaaggatttcgtggcgcccgaggaggtgacgccggccgatctcgaggaaaagaagaagaagaaggagaagaaggaaaagaaagagaagaaggaaaagaaggaaaagagcaagcggaaacgcgaggccgaggaggatgtcgacgccgacgaggctgccgagcgcaaagagaagaagaaaaagaagaagagcaagtccaaggaagtctcttccgatggggaatgatctgctctttgattgtggtatcggtatcttgtatcggaattggcgcttatggcagtgcataggtctggcgtttaaatgtcttgtctcctggttcttcgttgcaacgttgcaacccgtgtacgcagctggtgtgtacatttacaaaaaatattgttcaataccaagaaatgatttagtctacgcacactgtcggaatgataattctgtaaaaagcatagacctattcatcggaaaacgacagatgtggctagtctagccttggtattctcttagggctgatggccgttgaaacgatgaggtccgtcctctgtatgtctttctatgaatcgtgatatcaatgattgtcgtgtatgaatgtcctctttcccatctatttgccaatgcaattgtgcatgtatcccaaaaggtatcggagtatctccaaaaaccgcagtgtctatatagacaaaaaccagaaaaggtcaaccgcccataacagatctgaagacagtagttcagactgccgcggaagtctcgtcatcagaggacgaggcgctggcattcaggcgacgcagcttatccgacaagaacctctgctgctcttcctggctcttctttaaatcaacaccccagaacagaatcaaaaagctggcaacgctcaacccaaacaagaagtagaatggcaacgagacattacccgacgggctcgcgtcgataattgcacttgagacgatgggtccaataaaagatgaggttttaccgatgatgctgaagagactgaagaataggaactcgtgaccgcggggtgtaacctctgaaatcataatttgcgagtagctgtaccagggacagatgaaaaggccgtagaacgcttggtagacctataatcaatcagtcagatattacgcatcatatggcagagcgggattgacatacccagacttcccatgcatgatggaagccgaacctctgggtccagataccgatcatgccccagccatcaagtaggatgattccaacggcgacggcgttgaacatagttttggttccgagcctgaagcgttgctggattgtccagaatgcgtatatgccagcaccctaagagagatttgtcagtttggaacaatttcgctcgcggaattagactcacctgtgcagcaatgccaacaataagcaggtatgtcagttccagagtattatacgaaacgatgctgttctgcaaagttccaataacagtcacagtggtgttgagagagtctccaagtaagaaataacctattgccaccgttagccccgtataatcacagagatagtaggataaaaagtcttaccaactagatagcacagactctgctttaaatgccagatctgcttcatagcatgccacagctgccacatgcctgcaacaaagatcgaccgtttgccagggtcttgacccggacggcgtttctcaagaataaaccacggaatcgagacgagcaaccacacaccagagacgaatgcgatcagcacactcactccccagttgttattagtctcgctatcattgaccttcaacccgaacatgatgcccacgataatggccaagataaagatctctccaacggactgaacatagaaagcgacattggcaagtttgctgcgcatcatggtgtccgcatagtcatattcctcccgagtgatgctcccggccacatatttgtcggcctcttccttcaattcgatggagttgcgcgctaagcccgggaacgcagcggtccagaaagtgagcgtggtttgataggcgatcaagcctaccatgtatagacccacgccgatacgccacttatccggggtatggacacccaaccagccgaagccaatgccccaggcaataatcgacagcgcaatcaagatgttgggtcgccagtaaccgaaatcggcgaaactgccgattatgaggaacaccacgacttggatggcgaacgagattccattggagaggagcacgatgctgttgacattacgtggtctaccgagaaagtcgagtagtccatcggcagggactgcctgggagagcaagttttgaaaagcagtcggtgcgaagtctagaacggggtcagctcctgcctcaatattagattgggaacgcggatagacccactgaatagtgacaagccattatttccaatgtaatagctgcaatcgtggtttagtttccacacagggtcaattcaacaagccacgcacgcataataagcccagatttccgtccgggtcgtgcgatatctctcgtcaaatacatccggtgcaatcgggtcgtcgatcttgttttggggaagaccatccacctccacagtggaatggatattgtctttctgttgatccatgactgagaaagataaaaggtaaaaaggacaaagaaagaaagaagaaaaaaaaagcgacggaattggacgggttaaatgaaaggcctacaaagtcgccccgcgtgctaaagccatcttgagatgaaccagttgcattgcaattacagtgccgatcacgataacctggatttagtaggctggactatatcgcgtcgggtctagttagggctatcacttgcagagacttgaaaaaagttccggcctctccggtcttgaagtgcttgactactttatctcgtcctatcagatcgtcggattttgcatcttccgcatttggtgggttaggtgggtttggtgggattcggtggcttcgcgaacggacatcgaatgtctcagcgccgatattagggcaggcaatgactagctacggtgtgggagtgagaatattgttctctgcatccgggcagtcgctagatatcgaaggattgaagctacaacataaaatggcgtggagcccgagtgaatgggcttgagaataaggttgtcggtgtaaattgtatggatacgaggagttaagaggctagctgaaacataactggacagtggcggtgggctcatatcccatcaacagtccaacttcaacctcgcgcgtcatatatgagtagaaccttggaactacgatatctcgtcactaagcgaagaaaacagccctaggctagatggactcagacctaaaatgtcgggagataagacttggaattgttacttttaatataaaccatgttataacctcagaagtataattctagacaggagtaaacaaaagcaaaaaaaaatattacataaaaccagccgatcaccgaccatcaaatgacagactatagtataggtgagtgagtatcattcaaccaatcactccgaatcgcccaaggaaaacgacacgcttagaaagtgaaagcgagagcgagagcagcaaccagggcaccagcagcagagccggcgacacgggtagcagagctgacggggacgctcgaggaggcagcggcagagtcggaggaagaggagctggaaccagatcctgagccggacttgctgccaccagtggcagaagcggcggatccagaggcagtgcgagaggcgaatccagcggaagcgctcttggacttaggcttggtggagggacgggcaccgatggtcacaccaggggcggaggcactgacggaggaggcagcaggagaagagccggaggcagaggcaccagagccggagccagagccagagttggaaccggagccggagccggagctagagccagagccggagctggaaccagagccagagctggagccggagccggagccagtggcagaagcaccggagctggagccagagccagagccagagccagcggtagtggtggaggcaccggcggtagcagtcttgccagcggccgaggtggaggaagcaacagcagagctggaagatgtggaggccttgcagctcaggtcgtacagaggggtggtgtcggtggatgaaccagtgacaccgaagctaggggcggtagtaccggcatcctcgagaatgtaccaccaggtgttggtgttgcccaacagggggcaagcaacctcgtcccagtactgcttggcgttggcgacgctggcgacagcgaggttctcggtagaaccggtagtgggccagccggtctcggtgatccagatctccttaccgccggcaacagccttggtcttctcaacgcccttgttgaagagggacttggcgtcgtcaatggagttggggtcggtgttctcgtagtaggggtatccatcgaaaccgagccaatcaacggcctcaatgacggcagagttagagctgttggtccaggagttccaggtgtcgacgtggccaatgggggcaccgctcaaggaagtgccggagatggcggagcggacctgggtgatgtagtcgacaagctcgtcggggtcgacaccgagaccagcgttggccttgacaccggtgacggagttacggtaaagatcctcactgccgacggagataccgacgaccaggtctgtgaagtcatcgccgtaggtgctgatggcagatgtgagggcagcaatctcgttgctcatgtcaccgccggaagcccagagacccaggagaagggtggtcttctccttgatagcggcgggaatggctgagataggagtgttggttgtgtcaccctggatcatggtgtacagacgggcactggtgaaggcgttgtcggttccaacgaggttcttggcagttgtaaactcggtctcaaagtcggattgggtcttgacgctgccatcaaccttggtggagccgtagttgaaaccctgagagatggcgtcggaggtagcgacagccatcgcgagggcaaagaattgagcggaacgcatcttgaatgattgaaaaacgagtgttgatatgggagtaagtgaaagagaaagagaggaagaatatatgagaagaacctggattaaaggagtgcaaccagggaagttctgtacagttaagatgaaggtagaagtggaagaagaagtgaaagtgggaaatgcaaacggaacagaagtaaccctctaaaagccctcgaaagaccgaaagcaaggttggttctggccatgaaaattcagtctagatttcgccacaacgtagtttagtggatcgaagtgggtccagacacgttggcttgtccactttaattctatttgccgccctgccattggtggaaccaccggtggactgattccaaaaatatgcatgagaggtgggtctcgatgaatcccatgggtcccgaggctgcattcgatgattttgtccgatctccccggatctttccatccggctttggaaagcttttcgcatttgaagatggagaggaataaaaggagatcccatttgtcgcagttgctatgtacagtagtgggtcacagacaccttagaatactaggtagaccctatgcaaaggaatatgatagagacaccttggtggagtaccgtgtcgttgcatgatcgaatccaattcattccctggaaagttccatcaggggtttactccgtactaatctcccctatattgttctacggcaacacattcggtctattattaacccacccctattaactaagctcaacccgtgatactcccccgacctcattgatttccaaccctttgtacggggtcatttagaacgatctgctctcgggcaatccttcgactttactccgtaatgaggtgtgattatagattaattatgggccggtagggggcagggcgttgtctcaacgctgtgttgtcgattctagatgtcgaacaatggcattcaatttggatttttctgtatgccatcccgttattattgttccctaactataactgactatgcagatgaccccttgcaggatattattttgatctaaccacaccggttagaacacgttgtagtgcggactacgtgtagactactctgttcttgcccaagtcgacttgaccgatcatacctgctcttaagatggccaaaaataggtattcacacttgtgttcgaggtcagcagcgtaggtacctgaatgtcttacccagcgactttggccttgccgatctttgcttgagtcaaataacattcattattccagatgtatgttgtaggtgagggctatgaatagttcatagtagattccctattcagctcgctcgacaaatattttccatctacttcgtacttcgtaatccggaatggatgggttacattcttcgataggggcctcaatgtccgcccaaccccaacacgagccttttaggtcatttcagtccagattcacattatagtctcgcattgaatcgagtgattggtagtccaataccaatttgttcatcaatatttgttatatatgattaggcatgtattgttcactgtagcaaaatgcctgctatcggcgataaccaactagaagtggggtaattacccacggggacctagggtaacatcgaaggtgtctcaaatcccctttctctacgcccatctgaaaccatggcaattgacgaaaaggttcaagcggtcttgaacaaaacggtcctgcgttatcgcggcccaggaggtgccatcgccgtcgtcaaagatggcgaggtcatcggccagcgtgtctggggattcgccgatctcgaccagcgaattcccatgacagctcaaacgcaaatccccatctgttcaattacaaaacaatttgtgtgtgcgttgttgatcgacctggagcgcaatccaaccccaacactagctgcaaagggcgatgtccggaagcagctctcagatcacctcgccgagatactaagcccggagctcacttctgacggtgaactgacaattgatcgcttatgcgacatgcaatccggcatgcgcgactactgggctatgaccacactatgggggtccaaacccgacgatgagttcctgatagctagagactgcggcccactgcttgcccgaaccaagtcattcatgttccagccgggaacggagtattcctactgcaatgtcaatttccacgtccttgcccgaatcatcgagcgagctacgggcgagtctcttgccaaattgctcgaaaagcggatactccgaccggctggtatgagcacggcattcctttgccccaacaccgcacatcacccaccgccctgtgtcgggtatgagggcgacgagcagcacggcttcacggccgctgtcaataggatggaatggtccggtgatgctggactagtggcttcactcgctgatatgatcgagtacgagaagtatctcgatcgctgttacgctgatccgcagagctggtaccacaccgcgatcgctgctccgaagtttaaagatggcactcctgcaaaataccgttatgggctagatcacgctgacatcgctggcgtgaacaccattggacacggtggagcgttgcgagggtatcgactgcatcggcgacacgctccacgcgagcgtttgtccgtcgttgttatgtctaacagtgacttcggtgcattcggccccaatatggagatcctccacgagctcttgggaatacctaagcctgtggcatcaaccgtccagccggccgcggactgggtcggcgcgtttcttgatcaagatactcagctgtcgattgtcatcaccaagggcgcgcgggatggagaggtggctatcagatacgacgggtcggccgagcctatcaagcttagtgcaccgaatcatgggaagtccgattccatggtcgcgacgattgatggagattttttgagtattcatcgtgtggtagataaccggatactcagtgctcggcgtattgtcccgaaagagtcaatccttaaagggacttcattccagggtgtctatcactgtgccgagattgaatctaccttccattgcattggcgaggatggcatgctatatggtgcgttcgatggatatctgggtcaaggaattgcaactcccatgaaatatctgggagatgatgtctgggtgttgacttgcccacgtggtttggatgcgccagctccgggagactggaccgttgtcttttctcgggatgagcatgatgcaatccaagggtttactattggttgttggttggctaggaaagttgactatgtgaagagagcctgaggcttttattctactatgcagagaaacgattattcatgtccttgatcatctgtcccttcgtatatatgaattacacgcagattccaagatgctagcggctgacagcgacgcactaaaaagtgtcaaaatcgcagtcgtatttagtgcctacatataaaaatatatacagtatcaacggtccttgtcagaagacactttctgcatgcttaatgctcagaaacaaagatacctgccatccccatgccctattcaaaacaattagtatatttcaatactcgaggtcgtgataatcgaaggtaacttacagtgcccacacacatcgaagtcacagcaatccgcttatcctgtcgacgcagctcagacagagcagtgacgacctgacgtgcaccagtggcgcccagagggtgaccaaaagcactttgagacatcagcacggcgtccatcaaatctggtcggagctcacttacatagcaccaccacgcgggttcaccttggattcatccaagcctagcttgttaacacagtaaacaccctgtaataacgagtgttagtcttgcttaatgtatagtcacatgataaacttaccattgaggcaaaggcctcgttaatctcaaaaatatcaatgtcatccttgctcaggttgaacttattcagaatcttagggatggcaagggatgggccaatccccataattctaggctccagaccagaaacagtagcaccacagaacttggcaacaatcggctgaccgagctcctgggcgcgcgagcgtttcatgagaaccagcgcagcagcaccgtcggtaatctgactggcgttaccaccggtggtggcactaggggcccactgcgggaaggcagcgcggaccttgccgagggactcaggggtcgtgccatagcggatgccgtcgtcgcgatcaacgacgatatccttcacctcgccggtcttgggatccttaatttgagtcttgacgggtacaatctcgtcatcaagccatccggccttctgggcgcgctcagccttctgaaaactgttggcagcgaacctgtcgtgctgctcgcgcgtgatatcgaactggttagctacattctccgaggtctggcccatgggtagggagttctgggatgcgatcgggtgcttggcgatgcgctcggacatttcaggggcgccgccgtcggcgttcttgctcatgctctcggctccaacggccactccgacatcgatggatccggcggtgatttggttggcgatgttttgcacggctagaagacccgaggagcaaaatcggttggcgatggaggccgctgctgttacgggatagcctgctgccagcaccgcggagcgggcgacatatgccgaaccggggcagaggacgttgccaacgcagacatcttcaacgaggttggggtccagattggatttctcgcggacggtcttcttgatgtattaattactgcaattttcgcctctaatcacggaggaagaagtaccgtgaggagtgaaatgaggaggtcatctacggaggtatctttcaatccacctttgcgggccttggtgagcggcgtcctggctaggtaagtgataacctgccgattattgattaattatggcaatgaagttgcagctgcaatcagtgacataccacatcatctgggttctttgccagaagcttctggcgggctgagccaggagctgccagctggttggcgacggagcttaaacgttgttgcggtgaagacattgtagggtatcaagcagaattatgaatgagctcaagaacaaaacaaagagaaacccgtttttaatattcgctgcagatatatatctcttactaaaaaagaaccgcggcttctccagacatcctccactccgaggactctcatcgtacaatttgagccgactggaagtgccgggactttgggggtcacacggtgtatgatactgtaatttagcgatcctcggcttgtaatggaagactgtgattggtgagtttgtggattcgtggacgtttcatggtcccacatgtacgtgtactttggcttcaatgttgatcaagggggtatgatattgagagagacattggagaagtcaaggatactctcatatcttgtcattagtaccttgatgtgacctcatctccgaagaacaatcttgaagccctagaagaagtgttgagctctcaaaaccggggaaatcttaagctttcccggggagacctcgggaggattatgggggatttcccatagaccccactgtgaattacattgtaaaaagaagatcctttggtatgaacggcagatcaagtctggctagcttccgttattagggctatgcttgggaatctttatatctgttgccatgccagttcctgagagcttcgaattcccactaggcagagaatagggagacacccgttggaaaggaatcactcattttatcgacaaattgacttgacaagtgcttgactagaaggaaatcggccttctctctcacaatggacattttctctgaagtcagcgcgcctgctgtagccatggcatccgccttgtcggtggccgctggtgcttatctgaatgcgaagcttgccattgccactgatctgcgaacaatatacggcgacaatgctactacgaagcggctaaaccagcgcatttctgagctcgacggctcaacaaccatctacaagatactcgagcgggcggtggaggttgaaggacgggctgccaccgatgcgctctggtttgagcagaagacgtggtcatacagtcaactgaaagactgtcagtatatgcctctgtcgggagaaaacatctcatctgattgctaatgcgcctgtctgtagtggtcgatagaatggctgctcttttgaagagccgtgatatcaaccccggtgatacagtaggtgttttcaccaccaattcaccggagatggtcgtgactgtgtatgctttgtcaaaattgggtgctgtagcagcaatgatcaacaccaacctgcgaggtttgttaactatgcaattctaatctggaagaatactgttgacattagtgatagacgatacttttatccattgcgtcaacgtctccggctctaagttgatcatctcatcagcagatttgtctcaagatgtctgcgtcgacctaccacacttcacactcaacctggactcattcgaaggtgccgaaacagatccagtcgagctgatctcctcggaaactctgcagcaattctctccgtcaggacttgcagcagccaagcgcagcccaaaagacccctccctcatgatctacacatcgggaacaaccggaaaacccaaagcctgcgcgatccgcaacatgctaaccttgatcacctccaccccgctctcagcggacgccaacaacccctcaaagtaccacccattccgcgtttactctcctctccccctcttccacggcacggccttcttcaccggcctatgcaccgccctcggtaacggaggcacattatgccttgggcgaagattctccgcctcacggttctggaaggaggtacacgactcaggtgcaacccgcatactctacatcggcgagttatgccggtatcttctcgtaacaccgccatcaccgtacgaccaggaccacaagtgcatcgtggcgagcgggaacgggctgcgcggggagatatgggagaagttccgtaagcgcttcaacgtgcctgagatccgcgagttctaccgctcaaccgagggggtcgccaaattcgacaaccacggtgttggagcttggggggcgggcaaagtcgggttttctgggcccatccgccgcttcttggaagatgatactttcgtcgtcaagtatgataccgatacggagatgccgtaccgtgatcctgtcactggattttgtgtgagggctgctctcggacaggagggtgaggtaattgggcgcgtccgggaccgtgggatgatgattgagtacctgggtaatgagggtgcgacggaagagaagcttctgcgtgatgtgtttcggaagggggatctgttccagcggactggtgacctggttgttcaggagaaatctgggtgggtgaagtttcaggaccgggttggtgacactttccgctggaagggtgagaacgttagcgcaggagagattcgggaccatatttgccggattgaaggtgtccatgatgctgtggtatatggtgtaaagttgagtgggtatgtattcgggccgtcttgttctttcgttttggtgagatcgcattactgatagtctccaccaggtatgatggtcaagctggagccgctggtatcacgctggtatccccagcagatgagacagaattgatgtcgaccttgtacaaggcactcaggaagaagggtgttccttcgtacgctttgcctcgactggtccgacttactgagaagtaagcattcccttgattgcaataatttggccgtggctaatcaaattataatatacagggttgccacaggtgtcactttcaagcaggctaaaggtgatctggcgaagaagggctggaatcctcgccagcattgtggcggtgatattttgtactggttggatggcacaaagtatcaaaagttggaagaacaaagttgggcagagattgagaatggcaaagccaaaatctgaaccttgactcttgataaatccgatgcttgtcgtcttgttaagcaaccatacggatacccatcatagactcggatgaacagaagccatattgtatctgtcgcaagcaaatactaataaggttttagtaggtggatctattcaagtgggtccaatacatccgtccatgggaaatggatggtagcgatagtggagtccggggatatatatccatgatgctgtgtagtagttccatcatagactttctgcgcggacattacaaatgccggcgaaggaatttcagagaaggacattactgaaacgttgcttctgcattggctaaagaactgcatcgtgacggaggcctggtgcaattttgttctctgcgttgagatgacggaagtagccaagcaaattagtagtgcgctggagctaagcagtccatcgaaatctataaatttattacctgcaaagattaatcactgaagcatcttccaatgatggatcctctattcattgtatcttctatagcggccggatactcataaagttcgaaggaatactaattcagattccgtagcaagacgagaatggctttagactcctcctacgacgagtcatcgccgaataaaggctgtacatacacaagtacctattgttcaaggtgtttctcgactcatggtagcttattaggtaccccgtaatatttctgacgtcatctttagagaacgcgggcgaagagctttgattcgcctagaagcgatttctgcgcccatctcgctctttttcctgaactcatttctgaagcaagttaagcgcagcatgaaacttcttcgtattagtcgaccactgactttgattcgtgatttcactctaatattccggggtacaatctctgaaaggagtattgagaataacaatcaccttggccttagtgcggctatcctagtggccttttaaatgagctcatcgatggtcgatccgacataataagatgttttcttgtggtggttgtggcccacccatgtcaagggatactcatgacttaagtcggatgttcgagtgacgggaagttcaacaactaagtaggacagcatccgtagcttggaatggatgtcagtctagaaatgagatgattaataaaaatccctggcatgtttaggtgctgtgcctggcatctggatgccgatcattgataaagaactggagttcgaagtacggagtatctatagtgggtcggatcaactccccacctatgttgtagcatgagacgaatgttcatgtgtagtagaataagatgaaattacggactgatatagagatacaatctctctagcagggattcttgtatccctcagccacaccctgcaggtacatgaggcgtagaaccatggggctacagaaacggtatagatctgccgctgggatcacgtgtggaggcgtcatcaagtgactctctttctcctcaccccaacttctatctcctaatcccaactccgcaccttgtctgagctggaacccactcttttcctgacattcgactgcacatacctgagtgacttacctttgtggccattttcccgaccgaactacaacggtcacagccatgaagttcttatcagccgccagcctcctggttcttaccgctcctcttgcaaatgcagccgcgttctctatctttgatcctacgcaagcttcactcaaggtgaccgataatgggaagtatccagtcaatggtgaaaatcccttgcagtactgtgccaaaccagacaattacaagctcgagatcgagtcggtggatctggcacccaacccgcctctaccgtatgtcatccacgaagagtgctctctaaatgtagtagatttaactagctaacactttggcgataatagagggcagaagttgacaatctcggccaaaggtaccttgctcgagagaatcgagaagggcgctaccgtgaacctggaagtgaagtggggtctcatcaccttgatcaagcagaccgtcgacctatgcgacgagctcaaaaatgtggacatggagtgccccctagagaagggcgagatgatcttgacgaaggaggtggaattgcctaagcagatcccaccggtacgttgtctttaaccgtttgatggttaagcaagcagctaatgtgttcattacagggcaaatactccgttcttgccgatgtttacaacaaggaccaggagcaggtcacctgcctcaaggcagatgacatcgtgttccacctttaatcctgtctatcttagacattgctttgcatccacttaccaggtggcatctctcgatttgctgaactgtcaatgtcattagcttatgtgcttgactggggttcaatcatccgcgatgctcttttccatgcccgtctcatgactacttcaatattcgcatctgttgtttcaagttctataacgctttgcagtacattcggatatcatttggattttctcatttctacgctctttgcatctattatatctttacagtcgtctgtatacacttcagcgagtacgactgtaaacgtgacagctactacctctgtctgtggctacaatttacaatcacatctctactgattacgcaacgtatgttaaatcaattctgtatacggagtaggcgcaaagagaatatatgtaaagggtatgcgaactcgttccagttgcgttgggtatcttccctatctgatatttccatgtttcctttccaattatactcaagcgccgacatcgtcaatgatgggaccgcaggtgttgtaaaccctcgaggcggaacggcgacaccaaatcgcgatttccctgctaaacgacaaagacaaagacccacataaagcaagcctactctccaaacagacgacggacacgcttgagaacactgtccttttccgggtcgtaggggtggtctttgctggggatttcaaggacggctgggaaaggatcggcgaatgcgtcgacgctatggcggatgcgttctgcgatctgaggttgagatacccgttagcgaatatgtaggcaatgagatgagagcgctgagaatagtgcaatctatggaaaagaaactcacatgctggttaatcaagagcacagcaatgtctttcctctcctgggtgaagttctggaaggcctgttcgatctccgaggtctcggtcttggaatcaacgacaaggaagtttctctgggagccaggtggttcggtaacatgctgtaaaaagagccagcacattaggatggcttctcatataaatgtcacagagacgtgacgtagatggggtagtgaacattatcataccccgatgcctgcgagcaaaagaccagtaaccgagctgcatgataggttgagctagttagctgggcgcgagcttttcgaagacgagcaatctggaagaagggtctttactcttcatcaccgatgacagcaaggaattgccgctcctggggaaccgagttagcgatcggaggggtcattccattgaatcgatgccaggtaccttgtatgttgcggccgataccgccatgacgaggaaaaagaaaagaagaaactgagatttccgagatacacaatcttcgaactggcagttcgagatggatcaagtaaatgacagatctggtgcagctgtccgttgatcgccgtggttatcgccgggagcttctcattacataagctgatgcaatttctcagatttcaatgttgtttactccagggcttcatcgtccgcaacacgtgcaatagctcttgactcaacagcgcctcacctttgatgtcattgaattatcttcttaactaagacgaagctgctgaggaacagcttccgtctactacgacccccgtcctctgacatgcctcgacttgtacgccgccgcccgctctccgagcgcatactagcacgcctgaacccgtatgactttctgctttggctttccgaggaatttgaaggtggtgattgggaccagctagagaaaaactgggcttttcccattggtattgcgctcaacgtgatattcctcatcgcgcgagcaaatagccgatccggtggtggtagcagggcttttgacgatgtgttcggcgaggacgatggcacatccctatttgggtggcttgtaagtcattcttcccggctttgtaccttttatgttgcctatcttttcacgagattcatgacaagctaatcggccgtggttgttctaggcctcattcatcatccatctgatggcccttgcctctacgggcaatgctatctacacattccagaagaagagacgctatcgattgtttgagaactctattgataacaacccggcgacaccatcagcacatcgtgtacgggttgattcaagccccgtgatgccgtctccgctgcgctacattgccaaggcgctttcaacagaaccggcacactcgagggcccaccctgatgcacagcgagatgtctgggagcttgcaatatgggacccttcgccactttgtctccggctcttttgcctcttcagcccagggcacgtcttggtatattggctgttccttccgacgcagctctcagatccacgccccagcgtgacgattgtgacgacgatcgttctgaccgctcttctgtccgtgcagatgtccttcatctcttcttcttatacacaacaagctaaggaccagaagattgtacaccaagaggtcttcaaagaatatgacactaaatatgtgcaacctcggacacatccgttgatgagagatgttgggacgcagttctcggatgaaccaccaaagaccgaggaggagtgcaatagggttgagacttatagcccggctcacatcattaaccgtggtttcaagaccagtcccaaccctaattacctcaagcacgtcgacccagaaggtttcaccccagtccgtcagccaactgcatctactcccacctctatattccaaggcccacccacctacaccccgagcatgtctcgagatggctcgcctatggctcgaggcactagccgcacaacaatgcgacaaccgcagttccgatctactgcaacaacatcaacaggtgatggaggaagtctcggtgtttacagccatgctaactctccactgaggaagtccgcgacaacttcatttgatcgccgcttacaaaacaacggagactttgtttacaaggagcgtggtacaactcccttgatgcggagttccagtccgctgaagagaagcagtgtaccgggaggaatgaatccaggtggcccagccaccgtcaatagatcggataagctcaacactcggtactaatacgaacgaatgaccaattccatctccactagcatgaaatgtcgtcgatccagatacgtcagatgcggagtcttctccaagccatgtgcaccaatgacacaatagcagcacccttcgtacatatatcccatcgttaattgaggctatacccaatatagtccatttgacgttttgtttcatggcattcattcaggcccaccacgctggagaatgcaagctacttatctagagattagggtccaaggcatttgctttctttgtgatcgctcgattttgatctctgacttaattgacttcgttcattgtattaaatccattgggcggctatcttgcctcggagtccttaagtttgcagtccactacgtccactaagtctggatcgtgctttcttttcaacgttcagtcttcgcaacttccatgcacagatgatgcaatctatttttaacatgtgggaggaaactgtcattccagatgccggcgggacatttcaaccggcattcaccccaggggctggcattcctaatcaccgacctggcattccgataaaccagggtccggagcacattattcttacgcgttttgagcacgatcacctatgaagatctctcaatagccagtctttttggatcgccccgctcctctgagtctcatatcctctgactgtcgccgaccgacatacatctttgctcagaaaaaccagcacagggaaagaccactctctcttcactcctacacggcatgggctaggacaactagactgtgctgtgcccgtagcatttgccgccccgaccacaatcgctgccagcttcagcccacaatggacgatgctcatgtcaaattgcccgatggacacctggtgaatctctcaccacgatctatacgcccaggtgcgtacaaagcgtatcgagtcgaatacaacccctcgaaagagctctcggcaacacctccacctcgatatccgcaagaaagaagatcaccagaatatgccatctcaggaggcacaccggcaaatatatctcaactgccaaaagctaccaagctgcctgttccgaggagtttcactgagaggcttaacgataactcgagtcaaacgcctagtccgactgcacttcctaaactgaccccatccagccgctccctgggacggctcggtgatcagtctaaaacattggacaaaggtcatgatcaatactggagaaaaatccgggataaattggaggattcgccgttgttagcaagacgtgccaggagcaagggcagtgacaatagctcatctcctaactcgcacatctcccatcaccgcagcagactcccggcaagcactagccaagatcaaacaagcttccgggcaggtagtgcgccatcaggcattccggggccaaacactgtcaataccggtcccgcacaggggtcgaggaacgatgcccccactacccttcccgtggacggccaaaataaatggcggaaggaagacgatcaatgggtcatcttggatgccaccgaaacatcaccccagaaatctgtgagaacagacgcgacgagtggttccagccttcgatctcatccttccgtttcgccagtatccgccgaggacagttctatcaccgactgggaagaccgattcgttgtgaatatgccaactgcaaaagatcccaatcccccaacgatgacggcgcaacaaattgccgagtatcaaagaagcattgaaagagtacaccgggacggtggccaaatggcagacccgaacacagtgcctagtcgtaacgtgtctcctgagatcagacacaatcctagcgaacaaagaatccagagcccaagggaaataactacatatgatggggcatacgagaggcgtcaagtgccgatcttgtcgcaagaggaacattactcctcgccgcagcctcagcaaaatcctcagccggagcaactttcacagcctcaaccccagcaaccccagcccttgactgcatcgcaacgccaagtagccaaccactactacagccctgatgagatcggatataatcgaattagcacaatttgggaggaatcgcccccaaagctcaaggataagcgacacccccaaaacgccgatgggtcttttttagggtgcagggaaatatccggggagaagaatccagacgaaatcctcaggttcgcttctctagacgacgcgagtctgcatccactcccattggccctgggctccaagaagaagcaaaaggcgtcgaaggaagtgaagatagcaacagaccgagaaaccaccaacagagtcgaggagaccgtgatccttcaagaagagcgactgcagtcttctcagaattcgagacctgcccaatgctcgaagccgtcagccatgtaccaggatcggagtttctcccagaacccgtccccaatcccgcggacgaggtcacaggactcgagcaaggagaattatcatcctaccagcaatatatccgagcgatccggaagtctagaagaaaatcggggagacgacgatgtgttcattatcacacccactatcacacgcactatgattcccacgcccgacaagaaagcatcttcgccaaagccgcaagggttgcgtcgtcctggtggcacaaacacagtcaccgccgaggctatcaaagccgttcgggcaaaggcccagatggtctctacaccgtcggggttgcggcccgggggacccaaaatggatatcaagccaacagggcgtaccttgacaacttcccaaacgttgccactcagcagcacatccgccacactgaaagaccaagacgacgagagtcgaaaccaagatcatgcgcaagatcgcaatccggaacgagtagcaggtacaacgtcgaatactatccgtggcttcatccgtaccaccgggcgggcaaaaccttccgggctggccagatcatctacagatagccttgctacaatcctgcgcaacaggactgagtccctccgtacacgcgccgagtctctgcggaatggttcggggtcaccccagcgtgcgaaccaaaagcaatcgccaagtcctcaaccgattcttccgtccagggacaattcggaatcatcacgatcggaacggtcatttcagtccaaagaaaccccaaccgccacgccaaacaggcccgcttcgccaaatgggcctccttcggcaaacaggcccccttcgccgaacaagcccgcttcgccgtccaaaactgctttgacggaaatcaaacccgacgaaccttcagcacgaccgactgcaccaagcaaaccagttaagaaaaaggtgaccttatcagagggatcccctttgtcaacgaaacccgacaagcctcctacatcaaccaaaaagatctccgcactagcaaagccgtctaagttggataaaatccccaagcctacaaagacagccgtgtctgaaaagcctcctcccccgaagacgaagacccctgatacttcaccaaaaaaggaagtgcaggtcaagtccctgcctcgtctccagacctccggtaaagttttggaaatcgcggagctcgatggccttcaggtttcgagtcccaaggagtctcttcaatccaacattacagacttctctaccgatataggcgacatgcactccgaagacaagggtaactctgagggccaaggacccaaccctttggcgctttcacttattttcaatattcttgtcgttgccgtcacccaagtgaataaagctgtgcgaatgggcactgacaacccttacgtcaaatgtgtggccaacaacactttgaacatgaccagtcactgttggcatgtctccaaatgcatatataccgtggtgtctcgctaccgggccacaggaacctggcccaggcctcgcagtgaccaggctatcagtcggttcatggtggagcttcttcaagccattgtgtatctcttgattcttgggtttgcagccatgctaatagcccgtgttattggctacgttgttctcgtgagcagctggattgcatggtttgttcgaccgtttgcatgggccttccagtgtgttggtcgtgccctgataatgtaaaattagacagatatttagctctatgcttgtacaagattgtttctctgggagtctcgagtttggaagggggacgttcgtcgtttttggtgctttcgggtctttgtcctggtctcaagcggttctacctactcacctaattgtgtctttcgactgtattcctagcatatcattaaataggtctcaaacttggatattatatatggaatcattgctcctgtagtagtaagaatttatattgattttgatcttctcgacttgaaccctagaaacagaagccgaagacccatgttgaagagggaaataaaatgacatgtaacttttctcgtgtcccccaaatccggaattcaatcttgtgtatgatattctctctctttttctctctttcagtcaaaaaaaagaaagccaaaacagacccaactccgtcatcctggtgttgaatggtcctgtatggtagcccgggataatcttgcaaaaccaatgccaaagcagagaaaatagaaggaacttaaaacatataaagttgctttcagcaacatttttcatgtgtggaagtgcgttgagcaattctttttttcggttcatgcgaacgaggtatccatctagccgagcagcaactcggcgttttgtgagataaaagaagcattctagaaaaaagcaagaaccgaaagatgagaaaaagaaagcagaaggaaaaaggcagggctgggctaccgtgggcagttctagccgccactgcgagctctatgaaatgagaccaagcgcagaagaataacgaagacgataagaacgaaataggccgtaaaggcataattatgttgaatttttgttcttcttgcattttttggggccatccattcttctggattgtgctagtccaaacagaaaatatgatatagtccagaagagaagcaccgggcttggagaagaatagacccgagaaaataaaagaaaagccgatcgatgaagcgccattgttaaaagagacggggtatcggtacattatgttgaaatgaaaacgctgaggaagaaatcgttgagaggtcttcagtcgtgacgccataagacattgcaggggaagcccgagatgtgttggagtagttgtttgtatgggctgtgttatcgttgagatgagtgatgttgaattaggttaggatgttgagttgatgttatgagaggtttgcaaagatggcatacgaccgaggtaggggtcgagggtgtgaatggatagcaaccagttatgagttgaggaaagctgctctaattggcagcaacgccattttgctcggcattgccgttgtccaatggtaccccaggcagctcgacgttgagatctttgacctcgaggccattgaataattcgaagacagcgttagatcggtggaagtcgttgtcaacgatattgaccagataccagtcgtccatcacctggtgaatcagcttgcgactagggctcgctgcgtcataacatttggaccagtgctcgcccaagaggtatgcttcatccttccaggctaagaaactgactgtctcgacgattgtaggctggatgatctcccgtccggcaaagataccccatgtgagggcattcgggctgtcacgtgtgttggtcctgagctcgcccttcttgttagtggcgtggtaagtcaagtcatcgttcttctcgatgcgagtaatgagctcatcgatcaagttggagggaaccagaagctcaaggtaggctttctggtagacgaaaccgttcttggggccccatccgtgcacaggatggcacgacttgactccattgacagcgggctgagagttgattgtcaaaaatccgcgctggtttaggttgagcaaatcctcctgaatctcgcgcgcttcggtcgtgattggggaatcactccacggcagtcggtcgagcttgccggtcaagaacttaacaaagatgtccgaaatatccttgatcgattttggctcgccccaaagtttgatgttctgttcatttgtacccttcaggcccacgccgtaagcgtcgagttcaccgaatgcaggtgaacgagaatcggtccagcgaccgttagggtactcatcccatgtctgggtacgagcaacgtatgatgagttacggttgcgccagaatactggtcgcacatcctctgtccttcggccgaggccaagggagggccgccagggcagcgcacgttgaataggggaatcgtccgacgggcaaagatcgagctctttgagaaccaattgagtcgcctgagccaggttcatggtataactaggcattgttaggacatgtcggaacaccagaattgagaaaattagtggagccaacttacaaatgcaggtgtttgataccagctgtgaccaactgtctgcacatgttggcgatcagagtctttccgatctctcgaaccgcagaatcatcgttcttgaccggctcaagggcctccatccactcagaaggcaccttgaccttagtccagttggaccgacgaatgaaagatgcgtatgtctggataggcatgataccggggataatggggacagtgatgcccttggctcggcacttcttcacccattcgatgaagttatccgcatcataaaacatctgtgtgacaacaaaagagctgcccgcatcaaccttctccttcaagtggtcgatcaattggtccacatcggtattgtcatcggcaccctcgggatagccacccacaccaatatcaaagtggttgccatatttgtcccgtatgtatttgaccagatccttcgcatagcaaaatccattgtccgtggcctcccatgtttccttatctcgcggtgggtctcctcgaagagccagaatattggtgcagccagctttgtaggcagcttggagcgcttgatcaaccttctctaatggcatatctgtgcaagtcaagtgcatgcaggtctccaagccatataccgattgtgccacgctgaccatctcgcaagtcagatccgataagcgaccgccagcaccccaggtgatatcgatgaatgaaggacctaacccatgcatgcggtccatccggtcgtaaagattctgtacaccctgggcggttttaggagggaagaactcgaaggaaattccaatctttccttccgcctcatttttggcaagcttctctcggatatgcattttgttgtgttaatctaatatttgtaagtataccaacatgcctagatagtttccatcaagggtcttcgtgctctgaacaaacataccgagggcaataactattagatcttttgtggaactggaacacccgtgcagatgagacaggcttacttttgctgtccgagaacccgagcacaatccctgtgtactgtgacacctcaatgtctagtaccgaggaatagagggcaacggataaaacacaagaaaagaaatggagaaaagtgaataaatcaagaaattgtgaggctccaaggagagtgaaggagaggaattgaggaacccggtgagcggaacattttggtggacaacatttggcggggaaggccggccatcggaggcacgtggtttatttctttaaaggggaattaggggtccaattggcaggtgaaatcaagaaaaaagggcatagtataagggatcatatgggtttctttcgttttgaactctttatattagaaaataagtatcaattggacttttatagcagaaatccgtttctcagactttataaggcgcgatatgaagccataccgcctgcccctccatagaccggcaaaattttctagttcgggttggtttcgcaatttgaccttgttgactctttgacaacagcttcagttctctagagaattacctacgacacccccaactccaaaatgtcgactgtccctcccccttctgccgatcaggactataagtccaccctcctacccctcctcatctccaacaatgtcctctcgttcggcacctatgttctgaagtctggccgtgaatcaccctacttcttcacctcttccctcctgcacactgcaccattgttgcgcgcctcctctgccgcatacgctagtgtcttgtctgccgagcccttcgtcaccaccaacgccgacggcaccgctcagcccaacttcgatattatcttcggacccgcatacaagggtatccccatttgcgcatctgtcaccaacgagctcgctgtgcgggactccctgtctggaaagaccacttgggacaatgtgagctactccttcaaccgcaaggaggccaaggcgcatggcgagggtggaaacattgtcggtgccccgctgaagggcaagcgggtcgtcattgtggacgatgtcatcactgccggcactgcactccgcgaggctgtcggtatcatcgagaaggaaggcggtatcgtcgccggtgttgttgtcctgctggatcgggaggaacgtgtcagcgataccgagtccaagagcgccattggcgttgcccagcgtgatcttggtgataagatccccattcggtcagttattggtctccacgacctgattgagaagttgggtgatagcattggcgccggcgaggtccagcggttgaaggactaccgtgagcgctacggtgcccaatagacatcggcttgtggaatccgccaaatcaaggcatgatgtatgagcaaagacagcaggatggataccaggatattttggagttgctctgaatatattattacttgaacattacattacatatattcaaatcaggagacggacaccttccttatgggctatttgacctgtcctcgatcatatttagactagccagcagatggctttcccattggctcatcttgggccaatatgatataatggcaagcaaacttacttacactgttgcccgccaaggttccaggaaaacaggtgataccggtgcttaaccggaggtattcaaaatatactccaatcgggaaacatggagctgagtatgaaagcttcccggtctttagtttcgctaattatgtagcgaatatattcatgggtgtgttttttactctccgaatactttacctatgttatattccaacacacccctgaactgactggctccactcggacgccggaatcctcgtcagcaagacaatgttctatatgaactcgaaaaaatagattgtctggatttaagtaccttggcaagccaataatgagaattgcgcggcaatcgacacgcagcacggcagatgctaccactgctaagttgtttttaacaccgtgcacataagcagcaatacaattgcctcatccagaatgaactgggcagtctatatatgtagcaagatgtattatcagattctgcgctcgggcatatgtatctactgcgtttataacttgatcagtacatggttgggacataccttgacgtagtaattcctaaggtagcaaattcaatagacaacacgtttgttttgagcttcgatctataacaatgcggagatcaaccgctggatacatatatttcgaaatagtcaggttttttttagcaaccttccaaggttccccccagatccttagtgagacatctaattggtgctatgtatacccctactatatgttctacggcagctccggtgatatcccaatggctgtctgcgtttcacaaagagtaacagcgagaaccgagactattttgttattttcaagttattttcgagtcattagagatcacaaataattattgcttaactatctccaattgatacttcgagtggcggaagcctttcaaacctctctctaatgtagcatcacatgccatcttacacttaacccagatcccatcaacaattgaactgtctatatatattgcttcaactaccgtcctcctatgaagacctaggatagctccgctcaaatcctagaacaactaataattccggtgtccaacatggaagtcggcttgcatttagaaatagcagcatatttagttattcttcccttgtttagaaggcttactatagacttgaacaactattgaaacgacttagctttctctaggatagactatagctagcaataagtattagaagttcgtataaattagtacaaagtgcagagtacagggaggctcggaccctgtacacccatatactccatacctttatgcaggccgaataataactttgggaacttagcccaataagaaatgaagacaacttgtttttgtatgcactcaccactgagctaacctgttatttctctgatagatacaattctagagttgctgcgcgttagacggaattcctgatacaaatgttgtcttcacacatcaggactgtagaggcaatgttcgagaccatgtcgatgattcaatatcaacgatttagtactcgggtatgtacaccaactctcaagcaagcaaatttgtttagtttgtctagcgtcgagatttcaattggaccaaaataagtctcgatgtgtattccgcgctgctcgtgatccccgctactctagacactagacactatccataaggtagtctcaccgaatcgtcgtgatacctgtaaagcatggattactctattagcctcgtcgagccacggccattccacaacggccgtctcatgcagagatctatggttattactcgaaacctgagcgatggtgacgcctcgtaagacatagatattcgccgcctgagtcccatggtctctgtaaatagcacacagcgttaattaggatgtcaatcagcatgaggacagaactccgtgtactttgtatctttttgcctcctatcagctgcgccttcggctctaaccgttcattccgggcttcaaggagaattgtcgacgtagcctatgcctattttttggaaccagagagaacaccaggagactttgttggaagaagtagactgtggagtatcatactccctttgaaccacgccgagtgattttacccctactatctctcaaacattctcaggtttctcttatttctattagccattccgcagctctcgatttcctttctttccccaccttttctacttaggagagctcctatagattggagactattggtcatattctacttgatggaaaatgcttaaagtctctcgttgatattagtccttttttctcgtcatcaatacaccaccctttcgcaacccctgcgactttccgaaaaagcaaactgtcaattatatgccctgttagtatcgttccttttcagaatacccgagtggcaagatccgatttggcattggtacctgtcgggtatacgagcctctttctcatatccctttgaaggaattaatggacctgctaacagggaatgatgaaacatagtagctgttcctcggaaagcctagtcgggtcaacggtcttcctcccactctacttcatatccgacacatgctacgatcctaagtttctctgaagcggcttagtacattgtttgtcgaccatgaattggagatataaaatcccagtccttgctcttctcgcagctccaggaatcagttggccctacgacgagactctcactgattataacatcaacgaaaaccaaacagcgaccaaccccttagactactggggagaatggcccgaccacacctactttccttctccagaaaattggcgctttcctgtatatacgcttttccttgaccgatttgtgaacggtgatccaacaaacgacaatataaatgggacactctttgaacatgatatcaattcaaaccaaatgcgacacggaggtgacgtggctggtttgctggacactttggactatttgcaaggaatgggcatcaaggttagcttcatggatggaaccttggtgcatatctaatatcaactgacagttgaacttctagggactttatcttgcaggtttggtattgatgaaccagccatgggggtctgatggttactcagcgcttgacacgactctactcgaccagcattttgggacaattaaaacatggagaacagctataacggagattcacaagcgcggcatgtacgttatttttgacaatacggtctcaacgtaagtcttccgtctaaccatcttctcttattgtgtgacaagaatctaacagcactagcatgggagatctcattggatttgaagggtatatgaatacaactacaccattttcggtcaaagagcacaaggccgcctggaaatcggaccgtcaatatgttgattttcgatatggcaacacctacaatgagacatgtgaatatcctcgcttctggaatgagaccggataccccgtggacgagtacgttaattatgagctaggcgggtgctacgacagtgattttgatcaatatggcgatatcgaggcctttggtgtctatcccgactggaaacgagagctcgctaaatttgcatcggtgcaagaccggctgcgcgaatgggtgtctagtgtcaaaaagagaattattcgtcattcgtgtatgatcatcgcttctttcgacatcgacggctttcgctatgacaaagctacgcaagctactgtcgatgcccttggggatatttctgaggcgtatcgaggctgtgctcgccgtgtgggaaaagacaatttcttccttccgggtgagattacaagtggaaatactcttggctctatctttcatgggcgaggacgtcagcctgatatgaagtcccagacgcttgatcaagcctttatgatgacgaatgcctctgatccggattactttatccgtgaccacaacaagcaggcgactgatgctgccgcttttcattactccgtttatcgctccctcacccggttcttaggtatggatggcaacttggctgctggctacgacgttccagttaattggaccgaggcctggtatcaaatggtcctcaccaatgacatgataaacgcgaacactggcaaatttgatccacgccatatgtatggagctacaaaccaggatgtgttccgatggccgaccgttgaatatggcgttgaaaggcaacttcttgctcttttcatcacgacattgcacatgcccggcattcctatgctcctatggggcgaggaacaagcgttttatattttagatgcttcagctgctaactatatatatggccgtcaagcaatgtctcccgcgacagcttggaaaatccacggatgtttccagttgaattcgactcaatatttccagtggcctatcaagtcgggacgtttgggatgctacgatgagacagtcacgtatgaccaccgtgatccagctcaccccgtgcggaacattatcaaacacatgtaccagatgcgacaggactttggtgctctcaatgacgggtggtggattcagctactctcaaaccaaacacgtaacatatatctcccaggttctgacggagttgcaacagaaactggcatgtggtctgtccttcgcagtccatattaccaattgcaggatttgggagaaatgggcaatcaaacggtctggtttgtatatcaaaatgacaaccgaacggtgaactatgagttcgactgttctaaccaaactgccgcattaattgctccattcggtaccaatagcacggtgaaaaacctgttctatccccacgatgagttgacactgcaagagggtccagtcaaacttgggttgaacggctctgacgattacaacggttgccttgacagtatgaggcttcgaccatacgaatttagagcctacatccgaaaagagagatttgttttccctcgtcctatgataaccaagttcatacctggacatgacactccattgctatctgctgtcgcgccagatgaaagtgagtcagtggatatcagtttgttcttctccacagagatgaattgctctatggtgaccgagtcaatatcgcttgaatcgtccaccgagactggagaacggccttctttggaccttgccagtgttaattgtgggagtgttgaaccggagattacttcttggacaggacaaattccatctacttggtcttggacaggtaccctgactggtgtctacaatggcgtgcataaattgacagtgaacaacgcgacaactcccgatgggagggcaactaacgccgtcgaccatttcttgttccgagtcgggcagtctgataaccccatgatctttaccacggcaaattactccagcagcttgcttcacagccgcgatgatggtactcttttcattgcacaacatgcagcaggggcagataaatatcggtactctacaaattggggtagtactttcactgaatggctaccatacgagggaggaaaccataccattgaagaactgccttggtctggaacaaagaagcagggatgggatgggaaacacgttcgagttgagtactggagtcgccttacaggtagcagcgactacatccaagagggcgacggaccgggctggagtcctgctatccgacgtcggttccctcatctcttttttaatggacctttcaacaggtacggatatgatgccggcttggataacgtcgtgagacaagataccgatggcctatggaaattccgctttatgactgaatggcctgcccagggtcagctgaacgtctggggtataaaccccgataatcaaccggaccaaagttacatctacggagattccaatggagactcaatcctcgaccgtctaccgccctcttcgctaagtgtgacaagcataaacatcactcggcatccaccgagcccgcacctcgcttggaggattcaactcgatgactcaaatttgcagttcaagcttgttcctacaggctccaaatacgttcaaatggctctttttatccttctttgcattgttcctgtcattacagcgtcaacctgcgcttatgtgttcatgaaaacattctatcggatcaagttcaaccaagttggcgtgagtgaaaaaaagacgctcatttcaatggatttcatcaataaattcgaggtaggccacgtggaagatggacagtctagaaacccattcagacgacttacaagcaggtcaaacttccttcaaagtacttctgcttttggtaatcgcactgcccaccgacgaaaagttctgattgcaaccatggaatatgagatcgacgactgggctatcaagataaaaattggtggcttgggtgttatggcacagttaatgggcaaacaactcggacatcaggatcttatctgggttattccctgcgtgggtggagtgaagtatcctgtcgataaacaggcagactcgatgtttgtcatgatcttggggaattcgtatgaaatcaagattcagtaccaccaactgaggaacatcacatatgttttgctggatgcgcctgtttttcgccagcaatccgttatagagccctatccagcccgaatggacgacctcgacagcgctatttactattctgcgtggaaccaatgcattgcccaggcgatgaagcggtttccagttgatctgtatcacatcaatgactatcacggctcggtggcaccgttatatcttttgcccgagactattcctatttgcttatcgctccacaacgccgaatttcaaggtttatggcctatgcgaacacagaaagagagaaccgaagtctgttctgttttcaaccttgatttggatattgtcacacgctatgttcagttcggcgagatcttcaatcttcttcatgccggggcaagctatctgcgccttcatcaacaaggctttggtgccgttggtgtgtcgaagaagtatggaaagcggtcatatgctcgatacccgatcttttggggcttgagaaaagttggaaacctaccgaatcccgacccctctgatacaggcgagtgggatagatccttacctaaggagagagatattggcatcgacaatgacttcgagatccgcagagccgagctaaagcgccaagctcaagaatgggctggtcttaagcaaagacctgacgcggatctgttagtcttcgttggaagatggtcgatgcaaaaaggtatcgacctgatagctgatgtcttgcctggtgtattggagaatcgagaaaacgttcagctgatctgcatcggtccccttattgatttatatggcaaatttgccgcgttgaaactggatcgaatgacgaagctttaccctggtcgagtatgctctaaaccccagttcacggtattaccacacttcatcttctctggtgcagattttgcactaattccgtcacgcgatgaacccttcggtcttgtcgctgtcgaattcggtcggaagggtgcccttgggattggcgccagagtagggggacttgggcagatgcctggctggtggtatacggttgagtctacgactacctcccacctattgaaacagttcaaattggccatcgacagtgcattaaactccaagcccgaggtgagggcgatgatgcgcgcaaggtctgccaagcaacgattcccagttgcccaatgggtcgatgatcttgagatcttacagtccacatcgattcgagtccatcaaaaggaacgaaccaaatcccacagccagtccgctgctgctggtgcatataatgccatctacgggatgatgacgccacaaactgcgtcaacaagatcgggcgcatcaacacctccattacaaccctcaagtcgcccgggtattgtagggtcactacagcgaagctctataatctacagtcgtgatgcaagccctggattcaatgggagacctaaatcgggactaagtcgccagatatctcatggtgttcagccggtatccggcaccattgagcatcgtggtcggcccgacgtcgggaaagtcggtgttatcgaaggtgacgacagcgctagtggagcctctccagaggccgaagaaaatagcgacgatgaaatgatggatacctgctatggtgatgatgattattccatgccacctgaaggagtaggcctaggtcgtgcacaaactcctcaacccagtttggcgctcaccaaagaggctctctcggcccaacgcacgagtcaaagctccttgttggctcgttgcagcaacacgccctctagttcaacggcaccgagtactgtcgggacagatgatacccttatccccccttctcgtccatgggcagagccaggaaaccgtctcagtaatgcctcagtcttgtctgtcgattcggttgttggagagaagaaagacttcaaacttcaaaaggttgacccgtactttaccgacagcaatggcgagtactacagagtgtttgaaaaaagactcgaggaactgaatggggcgaactcagacacccaactctgcattgagcaataccttgagaaaagcgaaaagaaatggttcaacaaattccgtgatgcacgccttggcctccatcaaggatcgccagctgtctcaatgcatcgtggcaaagcagagacatccccgacggggtcagttgccaacgacgatgcgacatcccatgaaagtggtgagcgcgaaagaaaaggtgctccgcctgatgaattccttcttggtgatgactacgtgccaccaacagggctgaaaaaatggatgcaaatgcgcatcggagaatggccggtatattctctcttcctcgggctaggtcagatcattgctgccaattcctaccagattacccttctcactggtgaggtcggtcagactgctacaaagttgtacggaattgcgacggtttacctgattacttctattctatggtggtttttcttccgatactacaaatccgtgctcgttttgagtgtgccgtggatcttatacggaacagcctttttgatcatcggaatggcacactttgagcctaactcacacaatcgcggatggattcaaaacgttggaagtagtgtctatgcggctgcatcatcgagcggttccatcttcttcgccctcaatttcggcgatgagagcggtgcaccggtcaaccagtgggtattccgtgcttgtcttatccagggcacgcagcaagcctatgtcattgctctttggtactggggttcaactttgactaaagcaacgaacgcgggaattacggatgtgcaggttagcgtcaccaatacctggaggatgacgtgcgtataacattgaaatcttcatctcaaggatcggagagttgctaaccatttttcatagagcaatatgtacaccagtcgctctcattttatgggcgattggccttatcgtatattttggcttgccaaactactatcgccaaattcccggcaaagtgccatcattctacaaatctgtcttccggcgcaagattgtactttggaactgggtggtcgttattctccagaacttctttttgagtgctccatatggccgaaactggaattgtgagtatccattgggcagacagtttatacgggtcttcttccttcctattcctcgaattacgctaatgattatcacagtcctgtggattacccagcacgccagctcgtggcaaatcctacttctctgtgttgcattcttcggctttgtctggatagcagttctcttcctgctggctaggctatctaagtcccatagttggatcctcccggttctcgcatgtggtctgggtgcacctcgttgggcccagatctggtggggcacatctgggtctgggctgttcctcccctgggctggaagttatacctcgggagctcttatatcccgcagtctttggctctggcttggggtcttggatgcattacaaggcctaggatttggtatgattctgctgcaaacactgacacgtatgcacatctgcttcacccttctggtatcacaggtcctgggctctctcgcaactatttgtgcaagggccttcgcaccaaacaacattggcccagggcctatctctccagatatcacggctggtgcgggcgctttgggtaacgcttggttttgggttgctcttttattgcagctctcgatctggtatgtgcgcccttgtaaggatatgagaaccccgtctaacgtctagattgaagtggtggctttctccttttcttccgacgggagcaattatcgaagccctgatcaacagcgcatttgttttgctggaagtgggcggaatggattgatgattcaagctctgcaattgtggtttcggatttccttgcgtacattgatgatatagttgcgtgttgttcgagtggctgatttgctgtcaaacagaaatggcccgaagtatttagtgtctaatataatgatacaatatctgacaagcgacagaccgtggccacacctgaataaaagttgagacccacctagtgggacccactcatcctaaccgtaaaattctataaaataccttaatatatcctatttgtggtatactaactgaattgggaggtccttagtgatggtaaatgatgacgatggtgtgccaaaatggaattcgagaccaagaatgtctcggtgccatatttgcgacgtctgagatatcagttgacgactgggtgttcgccttggagacgatgcttggcaggacgaagcacgaagcaggaggggagatccgatctggcaacggctactagccagttgtacggagtagtatcagactcctttggtcacaatcacaatctcgaggtgaaatagaaagtgggaagagaataggtgataagggccagtccaaacggaatattcctcaactagggcatcctatccttcatttccttttccattttatgaatccgcctccacagtaaccaaagcttaatgagattagatcacaaagctcatacttcaatgcgctggtatatagacgcgaacgccactgaaagaataaaaaaaataaaagattttgacattcaggtcatcgtccattgtgacgatgagggtaaggcagagataaagggattctggcagctgcagcgcagagatatgggcaaaaatacgtgagcagaagataacaagaagtttgaaaatggggaagattgaattatcatagacatcagtatgattcaatagttgccagcagtttacagggtaaccacgacttgcggccgtttcccaattgggattagtctcacaagaaacacatttttagctcgctctacgtattatttacgctacaatgtagaacgaggaataattttttgttatataaagtacccacgatcataattcattctcgttgaaattcgtaggctacccaaattataaaatagcccatgattagcatagggcaaagcaaaacacaaacagtagccgcaacaagtaggggaatatgattctaaaatccaaacatgacacaaaaatgaattgccgcagtgccaagagccaaacccaggcacttgacaaacacaaagaacaacttttaccactcaaggggctcgttcttcacatcaccgcggttggtcttggggacgggagcggcctcaaccatagtcgcgccacggcggccacggcggaggtaggcactgccatccaaccagggggtatcgagggtgcgcttggcctcgaaagtgcggatcttggactccatctggagagtaagaccgatgtcatccaggccgttgacgagacagtgcttgcggaaagcttcgacttcaaaggcagtgatcttgttaccctgagcatccttgatctcctggttgacaaggtcaacctcgacctcacggccggcgcgggcctcatcggcgatcttctgcagagcaacctcatcagagacgatgacaggcagcatgccgttcttgaaggtgttgttgaagaagatgtcggcaaacgagggggcgatgatgcacttgataccgaagtcgagcagagcccagggggcgtgctcgcgggagctaccgcatccgaagttggggccggtaacaaccaggatcttggagttacggtaaatgccttggttcaggatgaaatcggggttctccttgtcgtcggtgtaacggagctcatagaacagcgcagtaccgagacctgtgcgcttgatggtcttgaggaattgcttggggatgatggcatcggtgtcgacgttggcgcgctccagaggcgccgcgatacccttcagggtggtgaacgggggaagaccggtgctctggccaccgccgctagcaggcgctaaagtgtttgtgtggggctcgttgtcttcagggaaatccatgacacgctcgagttcgtcctcgctgtcgggcgattcgatctcgggctggacgtcgaccttaggcgaggccttgccgaggacggggctggctacgatgtgctcacggacatcagcgagcttgccgacaatggcagcagtggcggccatggcgggggacatgaggtgagtgcggccctgggcaccctggcgaccctcgaagttgcggttggaggtactagcacagcgctccttgggggacaggatatctgggttcatacccaggcacatggagcagcccgcctcacgccattcgaaaccggcatcagtgaagatcttgtcgaggccctcggactcagcctgctccttgacgagaccagacccagggacaatcatagcacgcttgatgttggaggcaaccttacggcccttgaccaccttggccgcggcacgcagatcctcgatacgagcgtttgtgcaagatccaatgaagaccttgtcaaccacaacctccttcataggagtaccagagacaagacccatgtactcgagagcacgcttgcaagagtccttgcggttctcgtcctcgaagtcatcggggctggggacaacaccagtgatcgggaccacgtcctgaggagaggtaccccatgagatggtgggaatgatatccttgccgtcaaggaagacctcggtatcgtacttggccccagcgtccgacttcaggctggaccagtagctgacggcctttttccactctgcgctaccgtacttgggggccagaggacggcccttgaggtattcgaaggtgatctcgtcgggcgcaatcataccggaacgggcaccaccctcaatggacatgttgcacatggacatacgggcctccatgctcagtccacggatgacagatccgcagaactcaataacagcaccgttaccaccagcagtgccgatgacaccgatgatgtggagaacgacatccttactggtgacgccggcggggagctcgccatcaacctggatgcgcatatttttgctgcggcgggtaatgagtgtctgggtagcgaggacgtgctcgacttcactggttccaataccgaacgcgagggcaccgaaagcaccgtgtgtggaggtgtggctgtcaccgcaaacgacagttgtgccgggcagagtgaaaccctgctcggggccgataatgtggacaataccctggcgcttgtcgcccataccgaagtaagtgaggccaaagtccttcacgttctgttccagggttgtgcattggagacgcgaatcattctccttgatgaagtcaccggcatttttgaaatttttccgtgaagtggtgggaatgttctatccgaagaaaacctccaattagtcgcgagttattagtagatatgggattgaacatacgtgatcaactgtagccagagtgcagtctggtcggcgaaccgtgcggctagcgtttgtgagtccctcgaaggcctgaggagatgtaacctcatgaaccaggtgtcggtcaatgtagatcaggcaagtgccatcgtcttgctcgttgacgatgtggtcttgaaagaccttgtcatacaaggtcttgggttgtgagacggcagaaggcatgatggtggagagtagaaatctgctgggagagaggatataagagtacaagatttaatgaagagagagagcagataatagggagctctgatgaagagcaatatagtagtaaatagtaagtaccgagatctgggcaactggaatgggaatgcctgttatatttttctgcgctgaacatccgcgatgtcgctggagagcttcttgaggggcaaggccgatctcggccggtcagcggcgaatggtaccaattttattggccgatgtggtagcacggcggatggccgatatcggttggcgttggacgatccaaaaaggggaacgcggctaatcacgctttgtggcggatacccgtagaccgctccggcccaagtaatgcaggcgcgctgattggctgtactttcccaaggttccgcctccgatcggcccgccggtttttggctcgacgcttatacgcttagcactgtgaatacgcatccggggagcctcaatatactccttcatcggctgaatgtgggttgtatacggagtactccgtacgttgatctggcttctcattcgggagtcatttcacaatatcagatgcattcatattctcggaaacataactgtcaagttttttgaacttgttcatgatctaacgatctacctaaagtcaggtatcaaaaaacgccaatcctgtatatctctaaagcaaaatttcatcaaggaagaaagcacgcaagcccgctgcccataggctaccgagacgaagcgcccaggtcgaccactatcctctttccagacactgagccactccgcaaggtctcgagtgccgcattaataccctccaacccaccctctgcatgaacaatctctggcaatgtaagatgtgtcgattgcagaagatcttccaaccagcagaccatagcttcacccactgtgggggctgaatggaagagcttaataggcacagtgtgatattgtacaccgggattcttctctttgggcagaccagttaatccaaggaggtgggcgtggccatcaggattcagcgccttttcaagctgtgttgctgtctctcttccgactatatcaatggcatatcgcagcttgcccccggtgacaccgcggataatttccactgcgcgatcagggtcatgtcgatcgactatcagatctgcaccggactgcacaagcttggcaccatgtcgtgctgcatcggccacgcaaatcacgcgtaacccggcgagtttggcgagctgaagagtaatcaaaccagtcgttgttgaggctgcagtatgaatgtcagtggtcagttcataggtagtaacatcggattgattcttacctccccagatagcaacccagtctccgcgttgtggcttttctgagtccaataatgatgcaaagcattcttcatgtatgtcggcgggtatatcattcttattgagtttcttgatgatattgggcaaattaggaccgggcacttgtgtgatgagtgaaaagtctaatccaaatgagacacccaaagccagcacagcagcgacgaatgcgactccgacagaagctgaagcgtggatagatgttgaagcaggaattcgggcagcattgaagtcggtggcaatggcgtattcttggaatgctgctttcctaatatcccggtaatctgttgatgggaccatcacaacatcgcctacacgaagacgggatgagcctttggggacttgcagcacaaggccagccaaatcccgcccgttgatccatggcaggctagggataccaaagttgaatgcactgatcaatttatctgttagtcatgcactataactgcccagaatcgtacaacttacggtcccttccagtcgatggggttgaggccgatggcaagaacctgcaaatcaacagtcagcatctcgtgttatacaagatccggtggcctgtcgtaccttgacaaggatctctccctcatgcaaaaccgaaggaatggcatgatcatctaccagggcgtactgttcacgggcccccttgagaagcaagactcgttgtcttgccgcctcagaccgcggcgacgggggttcactctccgaccttgacacatcagagtaatctgagacagactccgaaaacagagtagtcggggtcttctgcaattcttcgacttggaggcaagtagaggtagtcgacatggtgcacgggggtaataatggcatggcttggaaggtagatcgcagagaaaacgccaacccaactattaggcttctatctatattgcgcttcgtcccagtctatataatctctcgggcgagaagataaagacaaagcacgcctcaatttagggcgcggggcagtggtccgaatccctcccatgagcacgtacatagggtcggagtacctccactaatcgcttggctctgagatttcttgcaagatctatgggataatttcgtctcacattcgcgcaatgaggacatttccgtacttccgggggccttattcgtagtcgttatccattgctcatggcggggcatctatggcgtgataaactagatggccgagggtcgatccaacgctcttatatctgccgaaagatgggggactttaaggattggaatgaccaaaggatctaatagaaatttgattggctatatatatgcaatagatcaatagagattgaatattctcgactctgttgaagtacaaaatcgaaaaattggatctcgaatctcgaatttctgagtttatccaaactgatgtgatcgcggcttgcgatgacgaaaactcgcaacctctagccctaagatgtcaacaccaaggacctgaatcacgaatatccggggcttctgagatctgttgagatattattttttattttatctatggagtacggaagaaattatttaccgacttaatccaacatacgtagttggtgattatggatatggaatatatatgtgatccctgagattcgttgtagctgtgcaacataagttgtaacagcatatccttttatagtgattggtacagtaaagctccgaataccacttgcgtatactagtcaggagtaattcgcgtctattttacgtacttatgttgtttagaatacaagctgggattcatagggtatctcctccatgttcccatgcatccatactcagaattccttggattattatcaattccctagatattaccttcattggcaagcattggcaagcattggcaagcctcttcttcactagacctaagaactctactctataaactttccaatttgggatattcgcctgcaggatttctgcccatctcctaagagtcccgtgcgagcacgtaattccaccgtagaacgacaacattgactgggtgtccaagctcgagccgttggaagctagacaggggtccagcaagacgaaacaaccagtcctttccgctattgccattcgcggagcagatcgttcggggcagtacagccgacaacgtggtatagacctcgtgggcgcgaaggttataaaccaccacaacgcctgtgaaaaaaaaaattattcactactcaattatatcttttatttcatcatgacgaactcagaaaaggaagctgtcccgagtgagaaggtggacagtgcaggttctatcacctcgcccgttggtgggccacataaaggtgagtttggaacaatgttcctgtccaacgtcgatgaagctgactttgaccctgatagtcaagtggtaccgatcgacattctacaatgccttcatcctcggtctttgcaacttcctcgcccctggaatctggggcgccatgaactctttgggtggaggaggtgaagagaaaccctacctcgtcaacgcagcgaacgccttgaccttcggtcttatggtcgtctcttgcttcttcagcagtgtcctcgtacgattcatcggcatcaaatgggcactcatcgtcggaacaatgggatacgcaccttacgcagcggggctgtacacaaacaaccgatttggcgtcgaatggctggttctcctgggcgcggcactttgcggcatctcggccggtattttctggatggcagaggcagcaattgcactttcgtaccccgagccatacaaccaaggccgcttcctgggattctggctcagcttccgtgttggaggacaaatcctcggcggtgccatcaacctgggcatcaatgccaatcggtcgaactcgggctctgtctcatacactgtgtacctgattttcattgcgctgcaggcactcggcccctttgctggtctgctgttgagcaatccctctcaggtccagcgaaaagacggagtccctgttaacctgcaggtgacaaaaagtatcacacatgagctgaagagcatgtggaagctttggatcaatcgcaagttcctgtacatcattccgttcatctgccaggctgtgtacacagaggctgtgatgttctcatacgagggattgtggttctcggtgcgagccagagccctcgggtcattcctttccggtgtggtcgctgtaaccatcggcaacattctcggagccttccttgacagcaagcgggtatccctgaaaaacagaactcgatacgcgttttacttcgttgtcgcatggcaaggcatgtgctggatctgggctacagtggtgacaaccgagtttaacgaaacacacccgacatatgactggtctactccaggcttcgggagagccttcgccctcttcctgttctgggttgctggcttccagctcaactatatgtacctgtaagttgaatctccattggtgactattcagtccatgttactaactgatcaggtttttcttggtgggcaaccttgccgatgatcaagaagaagtcgtccggattgcgggcttgttgcgtggaactgaatccgcagctcagtgtgtcagcgtacgtacacctcttatctcgcttccgtgcaacatgaatactaacgagctatctctagtacggtctaagcagcgtgaacatcatggccgcggtggggagtatttatctcaactttggcttgtgggctatcgcgataatccctacctggatcattatcaaagacatcggaacagcctttgaggataaaaagatcgctagagagactcctggtttgcgcgaggccgtcgatcaggagtaatttgtttggagcgtatactggcgcaaatattttaaaagttggtacagcacaagaacatttaatttagaatttggtgtatcaccttccgcgttcaaaatatatacattgaaatgatgatgcttttatgatgagcctgttcccggggttctcgcaacccaggtcaattttaaatctatgcgataaaaccgaactccctattatcatggtggaacacgagcaatgcaaggcgatgtctgacgaacagaccgagcatcccacaggcagtttgtactgcaaccatgtgccacgccagttggtcttctcgcattggacccacccacaccagccaaagattcaagatggtgagattactggattcagtgattcgaccattctcgtcttgggtgattcgcaccagtttcaaggtgtgtaataagcgtagtacggtatcgatgaagtgcgaaggaggactcgtccactccgtgactgaagcgtccagcaacccagtggaagcgtggaactttggtaaccgatgacgaggacaaggaatgagatggaatagttggggagtggagtaaaggaaattgaagatctgtggaatgaacagcagtaacagggttttgctgaaatgccctaggataccaaccacggcaaacaccattcctgcgaaatagcagtatgtatcgcccacaaacaccttcgacggataccaattatggcatagaagggctgccgacacaccgatgaatggaagcaggaagtacatcgacaataagtgcgagtcggtggcagggtgcgggtatggtgtcataggtgcaaggtacatcgcatcattgaatagcaattggatcgcaatcaccagtgactgagctacctcgataccattaatgcctgccaacatgttgatcgcgtttggacagaagattgccaccgctgccatatacatgtagtacagccatccaagatcgacaacatcacccaggtaaggttgcagcggcaccggcacgacgacttgagtgacgccaaagtcgacaaagtacacaatgagcatggggattgcggaaaaagcagggatgaggactttgtgtctccagcgaatgtcgaatagatcatcaccgattccgagaatcacaacggattgcaaagacagaagaccagaaaggtaggaggcgagctattcaattgcacattaaattgggtatgcctcagtcaattgaaatcagaactcaccttgccatgtggaaatcgatgaagaaatcggccattctcaatatgttgcgatggaaccacaacgtcacggtttccgcctccggatgtggctgcaacgatatccttgtagaaggcaaaaggaatgaacataatgagcgccatcagatacacaactgcgcagactgcacccatagtttcaggtctagaacaagatattagtacatgctatgaatatgatctcaagttcaagagccatatacatacatctcgggccggctaggctttgccatatccttgcctttaagtcctgctttcaaaaatacagggccgagccacctgatcagactaaaagccacagcaaatactatgccacatagtgcaattgaagcgactaaaggcgccccatcgccttggaacgtggcgttgagtatggctaaaccggcccccacgagtgccagtagacgccaagtctccttacgggagagggtgcttgggttattcatggcggacacacgaccaaaatggcacggacaaggcccctctgctgcaatgaggaattcacaagaaattcacaagaaattaacctatacaacaagagggaaagtccacgtcgaccgcaatctgtcttcattcttcgataagcttatcgtgttctgccagagttatcccaccgccaattttagcggtgagagggcatccccgtgatgcttgcgaccaataaaggtaaggcgacgtcaaccaactgtttcatacctcatacgtgcagatgcatgaaatccaaatcctcattggcccagatatttaattcgtcagtcttctagcccaagtccgttccgatgggggcaatggagcgccccgaggtaacggccggatttgccgacttcgacgctggccatcgggatctggtcaccgtcaccagatttaacttctatggcaaccgtattgttaccgcttcttctgatcaccggatgaaagtttgggatctacaggatggcaaatggcaaccgatagacacctggcgcgcgcacgatgccgagattcgcgatgtatgtccccaaagaagctagggccaaggctaccattgcggctcgtactaaactactattttaggccacatggaatagtcctttcacaggccaacacattggcagtgttggagaggatatgaagttaaaaatctggcaagaagatgtcacccagccattaaacacaggacggcgattcaagtcaatctatcgcatgactgcaccacaaaggcatccatttgtatcactcgactttcgcaacattgacctggagtcatggcttgccgtgatcacacgggacggctatcttatggttatggaacctgtcagccccgatagccttgcagattggcagcctattgaccagttccgtgtgtgcactgccccggaacgcggcgaggaaacaagtttcaaagtccagttccatcacgatcctaccgacattacccacactgtcttaccggagtccgatcggaagagcctgtcgctaattgtggctgccatggacaccgtcaagctctatcgcactgatgcaaatcgacgattctaccatgcagttgaactcaatgggcacagtggtcttgtgagagacatctcctgggccaatggttctgtgcgtggttatgatcttattgcgagcggcggcaaggatggtttcatccgcatctttgaagtgtacacgacaccagctggccaaacactacagatattcaacggccggaaggcagaacttcgcaagcagccccagtcgcagtcacagtcgccccgagcgacatcgcaatccgggatcggctctgctctagcaaaccgtgtgcctgcgtcggtgactgatcgccaagccagcggggagccacaatttcggcactcgttcaaacaggtagcttgcattgacaccaaacacctcgatgtgtggcaggtccaattctcgttttctggtgagtattctttatttattaattcaaatcttttcgctaatatactgccaggtgactcgttgatctcctcaggagacgatggaaaagttcggttctggaaaagatctttgtctggagaatggctcgagttcgccgaaacagacatggcgtctcagtgatgttcttccaagcactgcaagaccttattcgggattcttgaaaatgcccaacacttgtctcttcctacgctctcagccatcaggcccatttattttgttcgcaatcaatgataccctctacctttgatttttgcttactcctgtgatctcacttggtagtattagtggaactaatgtgctggatttaaggtcgatgtttttgctttatctgtatctccatcatacgaggaaagaacgatgttaggagatgccgtggttggtcccttgacaattttcctctcgagccaaaccactctccactctctatcctcgtgcctataactgttttattatctatattcattgttaattcactatggctgtcggtccgaccatcggcactggtttgttcatcggcgctggccaggccctcgcggttggcggacctgcctcgctactcatgtcgtacataatcctatctcttttgacctttgccatgaccacgagcgtggccgaagtatccagtcacatgccatcgcaacatggcacactcgttaccaatggctacctgtacatgtcaagcagtctggcatttgcttcagcatacctccgctggtataccctcgctttgtttgttccatacgaaattacatcggcgatggtcaatcttggcctatggaaaccgggttccactatcgcaatcagattgactatcatcacgaccatcgttgttggcttcaactttctgccagaaagactcttcaaaagttccgagcgagtattcactatgatgaagatcggcacaatggcgaccctgttcgtgctctctgtggccctgggtcttgggggtgtggatgcacagcccccatggggattcaaatactggaaaactccgggtgccatgaacgagtatctagttcgaggcatatggggacgactcctgggtttcttgcaatgcctccttgatggctctatcgctttcacgtttgcccctgagctgattgtgcaccgagcggaaatgccagcatcactcgtgccagcatcacttggcgaaacaacgatgctaagcgccggtatcgccggtagagtcacgtccgacgttgctcaaacggcattgccgtatatcatgagctccctggccatgggcgttatggctcctttcaatgagacgcgcctaacgaacaacggaacaggttctgggctttccccttacctgatcggactcagtgatgcaaaaattcaaattgtacctacgatcgcgacgattgcaatcctgctctccgcggtggcttctgggcgatcctttttgtatctctcttctcgcacactttgtgcaatgtcagagctcggtcatgcgccctcgatatttgccactcgcaaccgttggaatgttccgtatttggccgttgtagcatccgccctgttctgctgtcttgcatttgcttccgtgaaagtgccgagtaccatcatgaacacctatctccttcgcctcgttacgagcgccggtttcatttcctcgcttgtgtcatgcaacatccatcatcacttcaatcgccggctccgattgaacaacatcaccaaacggtataatttctcttcacagccagtcggtacatacttcgggatgatcatcagtaccctactgctgctgggcggcggattgtgggcaggaccgaagggaaatattattgggtcccgagcagccagactgatcacctcatatgtcaatatcggggtattcggcctgctgttcttggtccatcgattgcaagactttttgcccgctgtcgaagttggaagacaagaggatctgggtggacacaaccatggcgaccatgaaggaccaagagattctcggacacagaagacatatccgcatcgggggaaactcgatgtaatcccagagggttccgggacatttgagttgcgactcagccagaccacgttctcggagccttgagtgtacgacatgatcgccgacggagatcaagcgacatgcgcgatggtatagaagtggaaaccgctgcgacctagcattgttattgttatgtgttattattgttattattattagcgattagttattccgagttcagttcattcttttttattataatagcattgctaaatagaagaacaggcctgatttaactagtgaatgccaaatatagaatacagtaacttttatatacaacaaacatactaaaactgaccggacaattttttatttttgttgtaccttttgtagtggcaaatggcgccaaatcacaaatcatatcggaatcctaacaaagcccccccttttaccacttgggacaactccgaacctctccaacttcctttcccttttctctctgccggcttttcacgtttgatatacaatccacgcctgaaaccttgtcgtacaagaacagatgacccctttggcccccccctctttgataccataaccttccccatctcctccgatccctcccaagcattttccgtgttttcccatgttacattttactttgcttcttcatacttcctatactccctcatactacctggatacttcatcggcccgccggaactctccctcatttgcacttctaatacttccccacaggtaacccaagtcgcctcctattctcccttactttctcacggatttctttcccgagccgagtttatgggatttcctttgtcctccctcaagcagattcccgtctctatgaggtttgaaggacggccggatcacaaccctcccagcacattcaagacctatatcattttttatgggatcttggtcgctgtgagatatctcgctttccaaggctactacatggcccgacatggcttttattatacccaggctgcctcttgattcatttgaggatatatgtatccttcttttttcatatcagtttcctactcacccatctagatgctaaccttcacgattgccccgttgattcccactgggatgcctagggcacccaatgacattcccgtgacttgccccactgcggtgaatgccgctagtccctattctgactagcgtgttccatggcttcctgagaacagtcggttttgcagattaccaaattacgataccggtaaccttggaatttttccaaattgccaggaaacctgcccggggggtgtctttcttttcacaatgaaatccaagagaaagagacagagcaagagagagaggcccctccgatggttgttttcgggtcgagtccttcccctcctcccccacccccctcgaagtcctctggtttctcccaagtccagacatcgccccctttcacccttacgcacatggtctctctaccagcccggaccgcccattctctgccttaggcccccgtagcctcctccttcctctgtctccagttcctcaaactcgctctctttttcctctcctttcccctaccctctttttttcgcgcttttcttcccttcttccttgttttctctcatttaatctttgcgccaacctcttctaatctctttccgatcatcgattctacgacttcctcacccccctttcgcttccttcttgtgaccgcaccgtcttcaactttccaacgcgttcactgtcctagcgagacgagattggaaagcgacacgaccacgagaaaaactgatatgcgactggaatagtgacagcctggctacgcctctgtcgagaaaacatcattttgtcttcgcctgagagggggttatctgtcggcgatgacagatacctcctccctcgccatcacgcaccccaccacggattcctatccggtccacgcccatcgcgggtcccctgctgctgtcgacggcgccgcctctgactccggcgcacccgatgaagaaccttacaccatcaaatgcatttgctcgttcgatgaagatgatggcaacacggtgttctgcgaagggtgtgagacatggcagcacattctctgctactacccggataagaaggtaccagatgtgcacaactgtgtcgactgcgagccacggccccttgacaaccgtcgtgcccacgaacgacaacggcagcggcggattcgagagaaaagcgaggacggcgaccggaaagcaagacgatctgggcccagaacacaaaagagaaagtccaatgatgctgatgtgaatgcctttggtcataaacgacatgactcgggttcccgtgagcagccaccgtcgaagagaacaaaggtgtctcgcgggccatcaacttcactgagcggtatttcggttcccccgggtctgtcggccgaagcgcgaaaccgacgatcgtctacctcggttgcggtgagcccaacaggcatccctggccctcctattccccattattcggaagaatttctctctctttacgaccgcgatgatcaatttgttgaatcgaagagtattctcaattacggcgtggattttgtgaatgaaattgtggcgtggctgaaggacccacagatcttggcccgagttaccgatggactcagtgttgaagacttcgccaaacggtccgaagaggccatggatcggtctcgttggccctcattggtaacggaaactgtcacggactcgacaattgagatcggtggtaagcaccccgtccacaagatcttgaaaacaaaggatccagttcagaaggacgatgtcgtcggtgaaatcttcggcaaactaggccacgtcaaagattataaaaagctccacagcaaccgatggaatgaattggggcacgccctgcctttcgtgttcttcaaccgacagctggacttgtacatcgacagtcgtcaggagggaaacgagctccgccacgttcggcggtcgtgcgaggccaatgttaacttgaaaatctacatcaccaatggccgccagtaccatttttgcttcgttgcgaaaagagacatacctgccaatacggaaattactaccatgtggtatttcgacgattctttctttccttccgatgcgacagtgaaggaggagttcaaagacagggtggtagacccgacggacgccgctatttgcattagcaccacattggcgaatttcggtggttgtgcttgtggaaacccccagacttgcgtattaaacaagcttgatcgtcgcgccaagccccctcccaacaaacgctccaaatcgaagctcaagggcaagaccaggaagccaaagtccctcggcctccccgctgatatcggtcgcgccggcagcgaaaccaccaagcatgttgatgagcacgaccctccggccgacgcccgatcaacttctggctccgcgcgtggtagacatactggcagcagtcgcgatctcagtcccacggcgtcacagctaactctgccagagctctccagtcgcgaaagacgtaagatagcggatgccgaaaaacaatttcaacagctagagcaggttaggaacgtcaatgccaaaaggaaaaggcgctctaatcgccctccgacacggtttacccccgcgacacagtcgagctcaactcaaactggcgaggacttcaaaccttaccacgagtttggccctgatcgaaagacccgtcaagttacctatgttgacgctcaaactgaactctacgccgatgatgttgaacgctcgttcttgcgcgcagaacgtctgaggcgaggatacaaactcgacatgatccatcctacacttatgcataagattcggtggtgcgcggggcatcacatcgcagaggacttggcccagcgaaatgcatgggaggccggggacttgagtgtcgtgccatctggggtcatcccctggtggtacggttggttcccgctcccaatcgacgacaggtctcatatcgaattgctcaaggaagattccgaccgaatgggaatacctgctgatcacggtccccttgcgatgccccctcggtggtctttccaccagtccaagtatctccagcctgaatacaactaccatggcattgcgatcagaggaatacattatgaccctccagcgcgaccagtccaaggtgatgttgatactcggggcgctctctcatacaaacgaggatccttcgcatctggctctagcagtgatttgctcaagctctccatttcaccttactggccatccactgcagcgcataccttaaggattccgggggctggcaatcgtggctatctgcgtgtttccatgccaccaccatcgaacattccgtcagtccttagtcctggttccatgtccacggggagtctcgcatcacctagttctcgtgacacagcctccccaatctctcttgtgccatcctctggttctacactcgcaggtacgcctgccaagaagaaactcagtcttggtgattatctgatccgacgtggcacaatgacaaccaccccgacttcggagccagctcctgccccaccttctggtccgcctcccgacgattcacgtctacgtactcaacactttctggctatcacttcggtttttggtgataatcatcaacctcctaagaccgaccccggagaccagaaccagtctccggatatcattatgacggacgcaccggaggcaacacccaccaaaaatccatctatctcttcgtaatacgaccatccacgtggtagtaatggtgggcctgtgataaagggaaaattccgccgtggatttaacgttatcttacgacccaaaatttcttttctcgtgtgatttcatttcgataccttacagcgaggcgggcacggcgttcggacttcaacttttttttggctatctgtgccggcttcttttttcttttttttctctccgacttttcggactctggatggcgtatggcgtggtttgggattggttgggaaataccatttgggtcagcgtctttgggaagtgtgtctgcctgagttgcagcacttgatctttcacgatttgtccagtcttggatatgtatggcctcttttcgagatgctagatagcttgtatgaacaatgtaactttttctgtctaacgtttccgacttcgcatgttttattctagtattcctctctgtgtggcttttcctattcaaattaagtggagcttcttgtttgactacgacggtgatgggtaagatgactcaatcatcatgaggggaacggggaaattcttcacccggcccctcgtttcttctcttattatctgtgatttctgcaactcatatccaatgcttatgccattgatcctaaagcagaatgaacaattccaacgatgaaggcctcgtgctggacgagatgcatcccagaccagcagaagtccccgagatcgagcagcccgctctccctccagcagacggagggaaagccgcatggctgatgctagcttcatgctgcttcatccagctaccagtctggggtctgtcgtgaccgaagcaagactctatctgcatgtaaacactaacgcaacatctagggttctccaccgttttcggcgtcttccaagaataccacttaacacacgacgtcctaaaggggagcaagagtgacctagcgactgttggaactacttcgaccgtacgcaactgatacatatgtcaacgaggccggctgtgctctagtctaatgctttatgttatccctagggactgctctatcttctctcgcctatcacttttacgcttttaacgagatacccgcgtctgcagtattattgtgcacccacgggcttggtcatcaccgtgctgggatctctgttgtcctcgttcgcggtgcgcgtgtggcagttgatcgctacacagggtgtcctgtgtgccatcggcaatgggctcttgttcagtccgtcttccttgtaccttgatcaatggttcttgcgcaggaaaggccttgcgcttgggactatgtgggcggcgaagagtattacaggtgttgttttgcctttcgttgctagtgcttgtctaaataggtttggctcgagtactacgctaaaggcttggactgtcgtcacggtatgagcttcctctttcctcggtttgatgttaagcatagggtgtgtcttgggtttgataccgaaccatggctgacaaaatctatcagttgttaaccaccctcgttgccttgccattcatgaaaccccgtattccaatatcgccatctgcttcagcccgtcgcttggatctgagcttcctcacacaaaccactttctggatgctgcaaacgggcaatatcatccagagttttggatatttcttgccgacgacattcctcccttcttattcgacaaggacggtcgggctatcccagaacaccggtacaatgctggtctcgttgttcaacgcaacgtctatcgttggcgggatagccctgggagcactctgtgaccgcttctccgtcacaaacatcatgctgctgtcctcggttggctcagcgttgtcagttgttctcttctggggtctggcatcgtcggctggctcggactcgtcgcagacagctattgcccttctaactgtcttttccatcacgtatggcttctttgccggtgggttcagctccacctggtctggggttattactcagatcaagcgtgactcggcgccatccctggataccgggcttgtctttggtcttcttgctggtggacggggtattggaaatgttatcagtggaccgttgagtacggtgctgattcaatctgggtctttgggagagagtggtctgaagggcaatactgggtttgaatcccagtatggaacgcttatccttttcactggcatcacggcctttttcggtgcatggagctggatgtggcggtatatcagccctgcactgcggtgtctctgttgatcgttcggaacagtctcggagtaggagcagagaataggagttggtggttcatagtaaattaagggaggacaaatgtaaagcgtcatgagtagattcaaatagcagctatctatggaaatgttttattcaatcaaactattcttttctggagaatgtcaattcttttctggagaatgtcaaggtgactcgagatgataataccgtgtcacgtgcagtccgcggagcttcgactccaaatgcgcgttcctcaatctcagccccgacaactttcttacatatacctgctgcaaccaagggccactgccctattctacaacaatggcaaccgaggccgcactccaagatcctctcctggcactgcgacgtgcgattgcctctggcaacctcccaacgccgacgacctcgtccgagctgtccgaccagcctgccacagacgacctggccaaagccacacacctctacttcgcccaaccagcccctcaaacaatcgctttgtcaacactcacacgattcatctcagcatctaccaaagcccccgttgacctgcgcagtattcttttcgcctggcagaacaaagatgtcgctatccccgagtacatcgccaaggcgcaggaattcaacgaagcgctgaagaagcagacgccagagggtggcaaggaggaaagtgttcagatccttatcttccttgagcgccttgaccttttcacctggctcgagggtgcctccgacgacagcgaacatatcaaacccctcgagggtgctgctgccgctgctgaggcagccgccgcggctgcaggtgtcgcgcaggccgataatgccgcgggaattgccgccggtgcaattggcggcatcacatccgtccccagtggaaccgcaggagcagcccaggctggaactcaacccggccgcccacaaaagcagattgaccctcgactacaggagatttacaatggggagcgcaagaccggcgaccgcaacacagtgctacgcggaatcaagccgacagtgagttactctctgacaggatacgatagacggtagcaagctaacgcctcatttcccaggacttctcacacgtccgcaagagcgccgaggtgttcctcgaccgcaaccgtaatcggcccggccagccaggtgtcaaaccaggcagcaagggctccatcccagctccatcagccggcctctcgatgccatcctcgcgcaagtcgagctcctcccactcccgccctgaccccatcatcctaatctcaccctccgcctcctccctcatccgcatgtcgaacgtcaaatccttcctcgaagaaggtatcttcgtacctccggaccacccaaccctcaccggcaccacagacgccaacctcgtaaagctagagcgaccactccgtctcaacggcgacgcttcgaaccccgcgagcgcaagctcccgcgccggcaaacccacccgcccaaccaagtttatcgtcgtcgacggcacgaccaacttcaaaccggagtactggaaccgactcgtcgccgtcttcacgaccggccagacctggcagttcaagtcgtacaagtggtcttcgccaccggagctgttcaagcacgctaccggtgtgtatatcggatggcgcggggaggatatccctagccaggttaagggctggggtcgtggagttgacacctttgctgttgagcgctgggacgagaagaacggtgtccacggtggtgggcgttggcgggatcgggaggttgttgagggtatttggactgctattgaggagggcatgagacttcgtggatggggaactaagtagacttttttttccttttttttggtctcggttcctctttctcggttttcctgtcatcttgtttatctcaataccctcaattctctaagaatatgatgaccatcggcattcaaggcgcagttttaggcgttgtggttgtcttttttttcttcttgttcctatcatgtttatgtatttatagctgatctgggctttcaatctgtaatttcgattcatatctggtataattcgtgacaagcacttcttcctcgggccaatatagccctatctaactcctagaacacaacatctgcctacattcctgcatactccattaactattgaattgcaatatatgataatataagaccgtattcattgcaattcccaattgaaggataatatgacatacacaagcagaccagaactcactcgctgtgcccggatagaacgatgcagggaaacttaagggacaaacgacggataggaaaaattgaaatcgagataaaagaaaaaaaaggacaaaaagatatggaatcatataacatgctcaaatgaaagcaataaatgcaagagataaagatgatgcgatgtatggggggacaagaaggacatgcaataaacaatcaacgccgggtctgatgctcaaaaggaaaaaagaaatataagaagaaacagcctccgatctttcaggttctcaatgttttgtttttttgtggttttctggttctgtgtttgtttcttttggggagagagagagatggatatggatatgggggaagagtgcgaagggaagaaagagtaagggaataaaggaaaaggaaaataaacaaaacaatgccatccaaatattacaaatattttccagttccggcctttctctataacatgagccatcgatcataacgtctttcgttcagctgagaatctcgtgacgagtggattaaaaaaaggaaaatggagatggcagccagccctcatcgagagagactgtggctggactgcatgcggaggagagagtaaataacttcgtgatcgggaacgatcgtgggcgagattgatcaaattgggtctcagggtcgaccggatattgtgtccccgttttgtatatggtgcgggggtttcggtgttggggccacaagcatgagagtgcagggttgcagtgcggttgaattcgatctctgccttggggaaggcgttcgaatgcggattgctggactgcatgtgtcgaaatgattcaggctgctgcaatgcaccgaagggctcatgaggagtcggaatcgcagtggtacgaatcgtcttcgaatgggttgcgggctatgtcaatgcttgtgggcggtgattgtcaggcacgggcagagcggctcatgctgcgttctgggatggcgggtggagcgggaggagcgggtggtgtgggcgagtatgaacgcgagcctccgatgatgtcgacatcgtgttcttgtagaacgacggagtacttgggatcgcgcaggaatttggggacagaatcgcttgacatcagcttaaacacggaagtttgagcaagctcgaacaggtgcaccacttcttggagactcttgaacatggactcgtcgtctcccacggccttggtcatgcggctggcgaggctgttgcggagagcatggtcgatgtttagttcacagggtgagccgggagccaaaaacgcgttgtacaatccgtatgctgcagccaaagtttcccgcactgaatcgaccttgttgaatgtacccatcttctccgccttgtggtaattggtggtgaattccgacacatcgaggtaaaaagatagattctcttcacacagcgagtagcgaaggaactcacggaaaagcaaacgcagagcgggatcctggaggatatgggtcaatcgggcgttattggaatcgcgtggcatcccacgactgtcgtacgttggcgcaacctcgcgggtcttctcgcgggcaatccatccacatacgcgctgcccccgttcggtaatgccgtagatggcatacttggaaggctggaaatgagcattggtcccaacatccgggaattgcttgtcgtcttgaatcatcgtgatcaagccatacttcaggaacagctcggagatcaaacaggtctcccggcgctcgatagtagtcgaacaatccatcaaccagtccaccgatgcctttccggtaaatgtgttgctataaacctttccatccaggagtttgcgctcccgagccaccttcactccaaccaggccgttggtgtaatcactaagcgagtccgaatccgaggttgaaatactgcttttgatgttcgggccatcctgaccagcaaagcggcggaagatcacctcgatcgtcgcgcgatcatgggacagcttgtcggtatccgtgtcccgctcgagattcaccagctgcatggtattgcgtggcgactccagtacatccatcacgtgacgagcggtaatgccgttacgctggcagaaacgctgcaggatattgataccctttggggtaagctggaagagggcgcccttgagcgggaagatcaaaagctccctgccgtcgacggattcaatgaagcgcgcatcgacaaatcgctggcagacggatcgggccatttccttggccatagagaatgtagtggtggtagtagtcgtaactatgcgggatgggtccttgggatcgggcatgcggttggactgggagaatttgagcgagcccaagttgttgatggcctcttccgaggtgaatgtgtggtcatatctagtgaaacgaacgcggtgcgaatccaacttcaagctgaccatcaatgtggagaacaagtccatgaaatcctgcgctgatcagcccaattgttctaattttgcaatcgcattccaatgcgagcctacctttgtgaatgggcgctcatcctcggtcatgcgcaacaaccttgacgacgtctgatgcattttgggtgcgggcggggaaggacgggtttcgtggggaggtgtaggaagacgctgaagagtcaagcgacgcttgagcaccgaattggcaggattgtcgaccaaggccggggacgaagggcgcgaggttcccgtcaattgctcgtaagtgtcgctgtcgaatggtggggtcacaggggttgcggagagcttatgcggtctcgacaggctaccgtatgaagtggaggagcgtactgtacttccagacagactagcaagagcgttggaggtcttttgagctaaggcagcaaaagaacgacgattgcgtgagatgataccgccaaaatcagaatcaggaactgaagggagagaatattctcggctgtggctcccggtttgggttggcattgaatggttttgagtcttcgggttgaaccagagggaggaaaaaagtggattatgccaaacacctgataccggaaaaaaacatgggaatttggtaaaataaaaaataaaaagaaaataaaaaagaattaagtggactaagtcctccaaggcaaaaatgtaaaaagggtaagaagggggacagcaaggaaattatacactatgacaatttcccattagtattattttctctttttttttcgaatcgatttcaatagaaaagaaaaggaggagtagagggaagatggggctaaaggggggggagaaagagaacgggattgaagagaaaataagaaaaatgatttttgcccgaataattgaaaatggaaatgaaaaagaaaaagaattaaaaaaaagaaatcaaaaagacaagaaaaagaaaagaagcgccattcggcctgtcagcctacaacatatgatccacagcccacgcgtgagccccgaaagagtttggcctgatgcatccaaacaacgtgggccatgaagatcggtgggttctggggtctggtattatatttgtaccataccatacctgcatattggctccctgggtctgcaacggatgttagctaataaatagctccctggtaattgcatgcaaggggggttatcaagtacaccagagccaaatgactgggagatgtgaataccctctctatagtccatagtcgatactcatggtttgggcgattccaaatcaacctatggaaccagagacagaaattaattaaaatggatccgcaatctgtttccaatgatttcattgattttttgcccgagttccaaggtcgaccgaacaaatccgtaatacgtgatactggtaatacctgtaccctgaacattgaacatggaaacattcctggcatacctcacccgttccattctgctactaccttactgccttaggactagtcgtctgcttttgagcatctggagcttcggagtattaacgggtgaatccagatctaaatcttcagtgttaccatattagtttgctgtctttcaatagcctcctccggcttcgatgggatagatctgactatgtcatttcacattcgatgtgtaagctaatcccgacaaaacaggtaatgatgtgaaagcttgaatccacgtggaaatccctacacttcccgaaatctaaggttatattgctaattatgatacatatctatgttgaataatcatcaataatagctaccatgggagtcattctaaccttatcaagtagcccttggcaacctagatatgacaacgggacattctttgcttgttcctcatccaagccacaccaaacctggaaatagatcagaaacattgttctatattggacacatggttccgggctgttgccggagagtgggcgttattgtacctatttatgttgtctccagagaatcagaaacatcctcgtacatatattgttgtatcacatgtcgccatcgggtcaaagacccccacctcactccgatcgtccaatggtggggcaattaggaacttggcacgctttcacacttcttccctgtttcgtaccgagcattgcggtgtttcgtcttgtcgctaatcctaatttggaatgtcagggaggtctcaatccgaaactatactaattgtacagcgcaagaagacaacatgatgattagttactaatcaatatataatcctcattgtcatacacaaggttgaatgttcatagtggggggaggggtatattatttcccctttgaggaccttgcgtaactagaaacatcccaaggcggtcaaaatagattaataataatcctaatctccaggcttccatggcaattccaagcgtcttcttttcgtttggtgtgcataacccatgtggtcccacgtgggcacacgtggagagagatgcttagcgtctgaccgccgaatccgctctcaactgttttgcgcatagaaaggaggcgcagcctcgcgaatctttgccgaatgtctcagttacgggtcgcgatgggcagctagcgctaacaagttccaggattttaagcgtgaaattaccctatcattcaacggttttggttcgcgtctccggttcctggaaaaagcgggtttcaggtttcctccccgtccagttttcgcgaaaacacggggttttaccgccttgacgaaacaattgacgccatccaataataccagagacgcccctagtgtcgcatacccgcggatcatgatcgtcaatcatcgcgttatcatttcctcatggcttgcaatacgtgaccaatacgcagtgaggcaggggtcgccaatctccgtggtcggggaccaacgtcagcgagataacgctaagggttaacacgagagcctcatcttacacttccccggtaagacagcccccaacacgcacaaagacggccctaaggatttcacttgcatgaaccgcgcttttaattggaagtttcagaaaagccattcaacgcccccggtcaagctatcagacacgtcagcaagacccgtgctgaccaagaaacggtgccggccaaccaaacctcctggaacatgtcacgcgaaacaacaatgcaagacgttagtgcgagtttcacccgccagatgccgactttcccttgactgaccaacaatttcctactccgtccctacgatacgaattaccagtttagtattccctatggagtagtcctaaaaaaaagaaggtttggactccgctcaggcgcggccatagagacagattgagcaaagatactccgtgatatgatagcatatgatatgagattggctcccccgcaagacgagattagccaacgaaagttaaattggatagcgcagatcgaagaactcattctactttgtacaacacaggacagaaaccttggaaggagataagaacattcgaataagcgacacgtcatatcgacatactttgcactatgtattgagatctatcgcgcaggatcgatcacaagaacgcgatcgaacggtgccacgtgtattgaaggggaataaaactgtttctcttctaacacgggcagctcgccggaaagggagtttccggtcgcgacatctcggctcagccctgtacgagcaatgccgatttggctcatatcactcccgtgtggctctagtgagaatgatgggtttgctagttgactagtcagttggttggtttcaaggagtctgacagaaccaagtgagcaattcaaggagtgggttagccaataattcgatatcatcgtacggggtaactactccggaattcgtatacgtatatactatgtagattactttcaatacgattagtgctcgcacatcagatccattattgcgagacgctaaactcgaagagaattggtggaaactatccctgtcgctttgttccgccaggcatgtcgaagtggattgaagctatccaaaattcagccccgcttacagattggctcgcggaggttttgctgttcagagtctaaagttgcggtcagacattcaacggtaagtagaaagatatcacttgagccgaaggagactccagggaccctcttgacgtgatgaggtatgtatcgttgtatctgacattacctctatgtaatttaagccacatggtattgtctttgtccagggtgtcaacatccctggcggccacgcgacaagggactcctgcaggcttgcattgttcaggggtaaaagacaccatctgcatatatgtaaattataacgtggattgtacaagatacacgttttgacacgagtcatgaaaactcaaaatcaccctgaatcatttcagctgccaagatgtcaatcctattctttcgggacaagtctgcatcctttgtttcagggccagggctgtccctagatgtcgatccgccaaatgaaaagcttatgtacattagctagctctatgacataccttgcctaaagatagaagggaatctcatattggactcccgtactcgacacaggcagcttactttcctagccacatatcacctccttgcctattcgagggtccctgcatgtagcaggtgtgcttcgtacatactccgaactgcatggttgtatgcagatctccacggaattcagggactcgacatccgagagttaattcctgttctgtaggaatgtggcttgcgcgattgggattcgaactatgcgctgatgctccctgggctgaccatgctaaaccctaaacatctgaaccctggctccggggtgattgctgagtaaaggatttagattttgaccaggcccggggtagagaagggcctagatgaatctcgaccttcgccttcactgccccttgatgcacatcccatactgagttcatttagatgttctagatcgcaatatcatatcaaccttcaatataaggtcgatcttcgctcccgaagacccatcagcagtccagatttaaataggccaagaaatcccgaggctacgtatcacattgcagaggccgaagctgccgagagctacgaatgtgggggaagcatgactgatgttacagtgccacgtgaaatgccggagaggtcgacaatttagacctcgagcacagatctatctgatcatcctctagttacagtagggcgaaacttgtaagcaaggtgtcgacctatccttcgcaagtatgaccccgtaatgggaccatgtggcttgcgcagcgacctacccatgtctagtgaaaaccctgacaaagtatgttgtaatgacagaaactctccttgcgactagcgaaaacactagtagaaaacaatcgcgtgcacgcagcacttcgtgaacagagcctcatgtctcatcggatctgttgcctattcggtaccatgctgggggagattgcacatatctatctctctggtacggagtagcggtgctgatctttaattttttgaaccctcaacaaacttaagagctttcaccgtgtaattttgcctcacctcagttcttctcggacatcccgattttttgcaaaatagtctgagtgggtcttttcgcatatgtatatgcaaagaccaaggttctgatctgcggccagatacggagataagagaaggatcttcgatgtagcgaagttgaactctgtttttcacaaatgggagcaattcgagtgcacacatcatactcccgaggtccttataggccgtttgtagtaatatcccttttgcccgtgtgtattataccggtgtatcataccgccacctgtatatagaatacgaggaattcgactttacccgttcgtgatgggctccacctgctgaaaacaggtagtgtagggtggagtgtagcagtgaaccacgtcatagactttgaatagttaaattattgaaccaagactttaaaaaggtggccctgaatcatgtacggcatccacagtcccggatttacgttaacggcgaagtccggcgtggcaaatctgtggaaacgctagaagtcttctagaatccttctagaagacgccaagaagccgcgtttcgggcgatccatggttcagcgggccaatatattaactgtttcgtctgtttatcccctttctgttgataaaggggctgtattttgggaaaagtctattctggttccgatgcgttgtttcaatgttgtttttctcctgttcctgaattccgactgatctcggaatacaactgaagataagggcttggtgtcaattgtaaaatgtcgaactatattcgcgctaggcattacttaaaatgtctgccaaaccaatgagacatctaataatatacgatacagaacaaattcatacccaagagtctcatgttggatctacgttacttgtagatctacaatgtacgtaagaataaggccgaaagcgagaaaacaacaaacctcttacggtatggagtactttgtatacccactggtccaccttcacggtagacacggcagaagagccacacgggaacaaaaggaccttgaagtccacgtggcagatcggcaaaacaccggtgacagagagaataatagccgacctacatatcaactatagccctaacctggttagcctgtgaggtactagggagtagctaaattatggcataaacacgtgtattccgttctttccatcttgattttcttcatgctctcatttactatgttctagtagtatattcaaacaattgggactaaaatcaagttctttcttgaagacgttcatccaatactcatttttcatacattactccgctcataccaatgatattagtttacaaaattatgttgggcatcccaacagccgcacgagccccaagaccaaaacaaaattacccaaaaggcatgtatcgttccaaaaacgcagcttcaccgcaagaccaaagcaaatctaaggcctggtgaaagtttgcgggacctctctcacacccttccaacacctgccctatcttattggattgggcagccaaaagcgcctgctcaggaacagcatgaaattgtgctgctaactgagtagcgaattggtcggtgcgctgcctttttcgcagccataagcagtgggtagatgtgacggcctccaggattccttatataagcgtccgctcgctccgcagcattgagggcttcgtacatgccaccacccgtaggctcccgtagcttgttacacatactccgtacttggtgggcattggttatctttagtttccgaaatatccgtcattatctgtctctgtgtaatgcttgaggaagtgaggaatcttacgagggtcttgctggcacatcaaaagcgcatgcttgggtctgccgctgttcggattgcttgttccacagacactcgaatagaaatcgcttcttctcctctattacagttcactatatatcgctactatatgcttatgtgtttgcttgctcgcttcctgtttgcattgtttactagtttactttcatatattgcttgttagatagccaagcaagaaggttggttgcaacgtttgtagaagcgccaccctataagaatagaatttgtaggtgagatcctgtatcctattcgggcgaaaagaagccgaagacaatatcaaaattctaatgaggatatacctatagagtcactaggccttccgcatatcaaaccccgatggtcctatacgcgagtgacgagattggtttctgcactcggagagtcaaaaaaagtacctggcattgagtcaggttggagtaaatcatagaacgcattcatgaatgatgtgaatcatctattggtcggtagggacggactgtcgctatccttgagtggagtctcaactgtcgaacaagagtcgtgagtggttttttggaattatatatacagaatcgagatgccggtgaagccaaagagggacgggaaattagttcttcattcagtcattatgattttgcctcacgagatgtccatatccaagctaatacgatatttactttactaggtttagtgatctcatatcgatcttgcattgaaatcctagctgagagaaaaagcaaatctgtataatgaaagatcggcctgagatgagaatctatgctaacctatagtagcaggctaagaagatcagggctattggctgtcaggtagctctatgtgaattgatataaaattgaggtgtctaatagacaaaggcttagatgataattgctaatctgttatgcttttcaataagctacattctaaagtctctgtagacctctcctaacatgccatgccataaaagcacctatcaaattcctccttgcgttcaattcaatctccaagtgcctttgttgagaccatttctgcctcaggttgatgagacctactttctaccttgtttgatcttccttctttctcttagccagctgatacaacataacccaaggtttcctttatcaacaagcaagatcatttcaacaagcatcctatttcaaagtaagttctcctctattcgaatcagggtcagtgtctagttaactgatcacctattctttaaagtcactatcatgaccttcgccaaccagaaaaggaaaactacagcctagagcgacaagtgaagagttctacagctcgtcagacatatattattggaacgagcttacgtgcaaacgtccaacctctcatccaacaaccccgagcaaccagttcatacctcgccgcaggtatcgatgaaacagtgcatgttctaggtctgtcgctaagccagtatcgccaaccctaaaaactccatataggacccgaaatcattgcgtcctcttctactgcctccgaggctcagtatcatatgctgcgatcctacatgactcagatggcccaacacattctctgcagtctttgatcaatatgtcgaattaagtggttcaaatcagccagtactgcaaaccagtgctgttttaatatggcgggtgttgcagcctaccagggcgattaaaatgatacttgatagtggattggcttcacccactgctttttcatgcgaggaagcagtccaaggagggagcgctttggaagaccttacagtttcgtcacgaacaactggcttgttcaggtcgtcaggcttttgggatgatttgttcaattttactttacttattttaccgctaattcttatcgtagcttgcaccaataaggggcaaagtactcatgaaccaaaatgacccctaaagtgtaccgaaaaagacatgacaaggtcgtatgaaagaatcattttatcgcgtggatccctagtggattctgagctatattagtatgaaggtttcagggatcgtcatgcagttatcgcaaatgcgataaatgagtgggactgtcgttgccgaatacaccaaactctctaaatgacttgcatcgttatcttgtggagctttcacccatgtgggtgctgaagaatgtagatcagtcggcattgtttgatttgtcattcctcagtcactcgcattcgcattatggtatgaccagagacttgctctgccacgtccagcgtagaattcggtgataacagccttgacttgcgatacggtagttttgcgaaccatcttgaggcagataaccatgtctagggtgtatctcgcaaggaaaaccgagaagttgtatacgttgtaagataccgctttgaggaacaataatccgtacgccatacataatactctaatttgagcttaatgctattatcggtacgtggcaagccgctcaattactattgacggaaatatttccatcaacgacatcagcccatttgaaatacgtcggtgatgcttgaccgtcgttttccgctactgcagggaagacggaagttggccgatgatcctaaggaaaccaaatccaatcaaatcacactccgtgcacgctcttcagttgcaaagtgccgagatcgtcgttgatatctccctaattaaccccaagcctaatagtctaactgtccgacttgagataaacctccgatcatccacttgttttgactttccttatccctgcaagcgcaaaactagccgtcttagcgggtcaagccacgaagcctgaagaaatgcgaaaaggacgattctaactagaaggagacgttctacttttgtctcttctgacaaagcggggcagtcagcgcgaagccggtgaggaggagatgcttgacgactcgctgttctcgtacggcattgcagtggattatgcattttgctatccttgtctagcatctttgcataattacctatacgttgcacaaaagctccttttatcaacatgtcgtgccaggtctaatttaccttctgaaaccgagtctcctatttccgtcgcaaccgcagtccggcccctatctcaactgctgcaacatacatacccggaaagggtattttgggctatcgcatggtccaatgccattcgggatttgctttgcacagccagactgcgccagacacatggtcagccatgcttggtcatgctcagcaatgcccagacggaagcgagcatatcgatctgcaacctgcagcatgacctgattattaacaactagttgagctctgggcttaaagagctagattactccgtatacatcgaagtgcatcagagccatgcgagtattgcaggattgtggagtcttcgacttccctcgctgtatttggctccactactcttcgtttcacctccagttatcacgacgtcacacacatccaataaatagtaacctaagtatcaaaaataaagcctctccgccatatgaattgaatggcccttggcatcctgcagatatcgcatggtatcccagtggtcggcgtcctatatgcagagtaatatatgttcaacgcacaacttaccatactaacacagcagcccctccttttaccatttgtggatagagatatgagagtcagccatgtcactttgaacacatggcaagccacatgcatatgtccgaaggccgcgtgtttgggggttcaattaaatagagtacagaatgtcaacttagaagaacagcatttacggggtacatattcccacaataaatacctttttaccttttaaaagactgtattttgagcaaggagatcaccacaaggcagtaagattcgaaaagctgccagcattcccattggcacagttgcctattagaagtacatactactggaatcaaagaagatgcaagatttgtctctatggagaatcaatcagccagttttgagattatctatgttgtacatggcattcatatctaaatcccgatatcgctaccactcttttatatatgtcataggcctacgcagatcatcagatcatcaaaggctaatcaaatgacatccactgcaccgtctatcatctacaactagcttttgagttatagcaatattacgtacagaccccctcagagctcacgggtacatgtaatccgtatcccaacaacgcgggagtgtgcatttcccatcaaagacaaggatgacgtgactgaccattctcagcaactaggatagacgatggaaaatgatgatcgccagatttaaatggtggtcaggtaggtttggggctagtgaagttttccaataacttgaatcatggagctggggggtgcttgcttggtgtttgttgtacatgtggttatgtacggagtacatggtgttttgatatatccgataccggccgtcggcttgagttcggggcatatgttggggctggtatagatcccctaggcttggttaggatgtgtatatttccttgtatagaattccgtaggctgcttgtgtgtgcgatgtgttttgtttatctttggttgtgttgtgttgcgatatcaattccagaatggagaattgggaaattaattaagatgttttccgactagcaactcatatcatgatagacggatagtcaaggccaaatgccatgcttgtcaccggcacaaataacccaacacagtaaatgcttgcaagatccacttgctgagaggtctatccgcgccaccactggcccaatgcacccccagagccagccatttcaatgacctcctcgaaactaatttccacacggaacatctgcccgtcagcagtgccgttcccactacccacgggtgtcacgagtccccagctgagcagtctttcccaagactctcgggccacatctcggccccagacacggcctggtgtggcagaagctcccgacaccgaggcagatacctttgcggatgtcaggagccgaacgtattctgcgtatgcggcggggaatgaaagcgcaagtggtcccatgctctgtgactgggacccgtcgtttccggggtcgaacagggctgccaagcgtgttgcggctaccaacaaagccagtggcaatgacgagggactggatgatgtgatggatgtggagaatgggagaggtgctgggtctgggcactcaagggattgggaagagaagcttttcggggttgggacttcgggtataggtgcgtcggcggtcgacacactttgtagcaagtcgctgatggggagaagcgcgctgttgaaaaactcctttgctgatttggtttggttgtagatacgcttgaggtggaattgaaattcgttgtcattccacaaatgctattttcaagacagcgatttagcaaagatgcaattaattggataaaggaaaatacagatcttaccttcaaatattccttccatcccccaagcagtgtattccacttgttcgactctactagaatgcgttcagacccaagttcatctgcaatatcaaccatttcggcgtcactgagatccaggctccctaggcagatatctgaaaaggcctcgaaggatcgaggtagaggaacgtaagtataacgatgactaaatcgactcttgacacgcttctcgagcatttcggttacgtcgacctttgtcgtgagcccaatcaccgcgatgggggctttgcgggcttgggcaatatcgaacagattatacaacaaagtctgtcgtgggtgagtgacgaataggtcgaactcatccaacaagatcacaatggatttcgcagcagtcttcgatcctgggtccccagaagtcccgaagagttcctctggatgtgacaataaagccaagagcgtggccatcgtatccgcataagaactgaccttagccgcatcttcctcggtatgcgtctcacggccaagttggcgccacatttctcgcaaagctagacggtcgtctgtgtgcaagaacccattgagacgaacgacgtgaaactcattgcaatgctcctttctaagagacgaaatgatagattccacaatagccgtcttgccgcatcccctggatccaagaagaagcatggagttgccctctccgatagagacggtctgttcaatgagctgatgaaccttctggtattcagcttcgagtccccgcactggaatctgtcgtttccctgtcagcttttcgagaagaatagtcgagagaatgcgcatttcgtcctcaaggcccgtctgacagagcgcctggaattttccagcatattccggcaacggctcggagacatcgatagtctcatgcgcctccggctggtcatgataaaggtcttgctggagttgtattgtatcgatgtcatccaagccgtcctgatacccaggcgaaggtgacttctctttcggctctgcgaccaaggctttcttggatctaggcttcgcggtgcttctcttcgatctggtccttgtaattgtacgaggggcgggttccggggacggctcgtcgaggtccatgtcatcatcgtcatcatcttcctccttaaattcaggttcgtcttcttcttcgtcttctaccggggattgccgcagcttttgcgcgcttcgtgtgggacgcgcacttctcgaaggagtggctgcttgttttctcctcgatgagggtgttacggcttcttggtcgtacctctttggtgttttgcgttgccgcccacttgaccgtgtcccaattcgtgcgggagtttgtgcttcatcttcctcaacctcgccgccttggcccgtcgttacggggtctgggttgtctccgcgggtagtttgacgccgcgatgcacttttcaccggtgtgggagaaattccgtgattgtcgggggatgtcgggacggagaatacgtcttgatcatcatttcccatatcgatgtctccatcaacgtcctcggagacccttctcctcttagatgctcggggcatggttgtggtttgaggaaatggaatagctggtatcgggtactttccaattcgatggagaggggatttcgtgagggtaaaggactcaaaccgggaaaatctggcggtttcctgtcagataagtgtttgcgcctatgtcaattagaatcagattcaatcaatgctgtttatttccgaccagcctgagtagtccaggagctgtcccaccgaatgtaatgacttacaaagagaaaatcaatagcgcatttatcgttaatcaagaccaacaagcgcaacccgtgtgaatcagattccaacagaagaccgggattcaattgctggtcaattgctcaaagggtcggccggacaacaattggccgattttcgcctcaggccgagacgcgtgacgcgaagtcaggtgcttcccgaggtcactttgacaagtcgcaacttggaattgctctttcgttaatattgtcttactgtagggatcagaagtctcaataaccgggattcacagacaaacatgaagaactgaagtcgaactgtaccgactactagggggcgggtatagcaattctcctgaagaacgcgacatcatttgtcaacgctacaaaaacatgactgccaatatcccggagatcatcctgctctgccaggacgcagactttatcaccgcctttcaaacagcgcagcaagagcactggcccgaattaccatcaaagctcacgatcacccttatcaactcgcgcctgaaccgccttgacccctcagtaaccttcgacctaatcgtctcacccgcgaactcatatggccgtctagatggaggctttgacgacgccatctcattagccttcagcccgcgtgatgactacgaagctctaacgcgcgcagtgcagctggagctatacgagaaatggcgaggattcgcgccgccaggcacatgcaggctcgtgcaatttcctgggccgcttttgcagaattcccggcgctgttcctgggtggctatctgtccaactatgcgagagccgatgaatgtcgtcttggaccgggaggttgtctatgagagtgtctggagtttgttatgtgaggtcgaggggcgtaatcgggcctctgaagagaaaattaattgtctcttgatgacgccccaggctgctggtattgggaaggttagtaaggagcgttggtcggcacagatggtgcttgcaatgaaacattttgtggacgcagtcgaaaggccggaacggtggagtcgaatgcagtggaatgagatcatgaaggattgtgacgaagttgcgacgacatggaggacaaaaggagcagcatagataaactcgttcccaattgtccttgtcgtcttaggtctgtatgtaagatcatggctagcctgaatgttacacttatgtttcctacattcatgagatggaatttggccgtgttgatgaggcgctgcgagaaaacgatgacagcccaaagctactaacaaggccacccattagtaaccatggattctatgtgttgcgggaagattaggttctctatagactgggccggggttgagcctgggactctacaagtggatgccaagtatagctttgccgttcgtggaaatcagattcgcgaggaaaaagaagtatctcgattatttgggatatccggatttattatagcacagctggtctttgtggagtactaggaagtgaggttactcatgacggatatgtccaactgctcctgctgtgtcaatgtacgattgagttggaaactgcgtaaaatgcgagcgttggggagattctgtgcctgaaccgaattaatgaattccgtgacactaggatctcctgtagagttgagctttgtccagccaatatgttgaattggagcagaaagcatctaaagctcgtcagcgaagccgcgagaagggatattccatctactgcgtggatgacaggttgaatgtcaggtcaagtctgggagtagttgctatagtatatattgaattcggagagatgaactcttccccaatttaagcatatctgatccgttcgaggtcggcttcaccacagccgaggtccaatatgatgatccgagctacggctgtggggtttagccttaagctacttctactccaacatttcttccccctaaacctttctagtgctctttgcatttgtcattcctttcagataccatgtcacataacgcaataagcgctccgcccaggcaactggacgagttcgaacagctcgtctatgagtatacggcgcgcatgggcctggggaacgaggaagtaagtaccatacgcagcaatattaaaataatgaattgcatcccccgcctatacagcgccagagcgcatagttgaatcccatcgcttacccttattgaagcactgggacatcgatgcccgcggctgtaacctccgcttcgagtccgcaacccgtggtcctccggctacagtttcgttcctcttgacgatcactcctgcgctgaccaattactttggtaacctccatgggggctgcgctgctactttgatcgatgttctatccaccactatcttgttaggcgtttccgagccgggcaggttctccttcggaggtgtcagccgcaacctcaagatcacatatctgcgccctgtgcctgcgggaactgaggtgcggctcgtttgtgaggttattcatgttggcaagcggttggcattgcttcgggctgagattcagagggcggagagtggtgatgtttgtgtgattggtgaacatgagaaggccaataccgacccggaggtgacgcagaggatttgatttgatgtgatgattttgtttctttttttggtacgtctagaagacaacatggatcttcgaatgttaagaggtagccactgggatataaatttatagatctcatttgcaccaataaaggtgccaaattcaagccattgtacgagcgaagatcatagtagtgaccagaatattgtgcttcgtttgctatgatagggaaggacggacaaagaacagagaggccatcgcacatgttcaagagaaatataatcaaccaatctaagcagtactagattatccgattgtaagtcgagtatccctctttactcggtggccagttgctggtcttcgcgcagaccctcaaccttcaactcctcgccagtggcacggcgatacacatcacggacatcatctgggggaattattagccagctattaatatattttcaatcacagatagcttaccggtcgtagtctcgaagtgtgatgtcgcgtcatagctcttagaaatgaagatgttggactcctcgccattgtcggtgggctcgtagagaggaatggggggtcccatgaacttttcttcgatcttgcccagacgctcgaagccaggctcaagctcaaggtggtggttagcatcgttctcggcgatggtggacacaatagcgacgtagtagcccttggggcagacgttatgagcggacgaaaccatggcaatgtaaatatctgaagaggttagtgccctattgataatgactgtatatatataactcaccatgcttgcgtccaacctgggactggggaatgatcagctgcacagagtcactgctgtcggtcttatcgatggggtggttcaggatgcaaatagccttgagcaagtatccggtgaccttagtcttgtcggggaagtaagaaggatcagcgatgatcttcttagtcttagtctcaaacttcatagcttcggattggtcgtcacggtccttcatggttgccttgattccggaaaccttgccgttctcgtaaagcacttcgtcgacgtcggtattcagcatgtaggtaccgccgtagatggcagacagacgagcgaagccctggggcagctcgccgaggccgtagagagggtagatataaggcgactttccgtagcgtgccatagagttgacatacagacggatacggttaatggtttcaacggcagcgccagtctggttgatatattcgtccgaggggtacaaagccatggagtgaccgacgaaatcacgagtgttatcctccaggccaaacttgtcgtaaacatccttcatcgtgcacgcatgaatgtccaatcctgatctccattagctatccgcttcgacgagccccgaactgacctaggttgcaaatacataccctggtgactggctgggtcgtcttccttgaaatcaccaacccactcgaggaacttcttggcgcgtcgcttttcgaacaagcccatgagcgacgagcggagagcttcaccagcatcggaaggcaccttggccacggtcgccttgggaccctttccttgctgaacgtagctgccagcaatctgcttgaactcgaggtatcgggtaacgtccgtggacaccaaaatgttggtcaactctccattggacatgagtagcttggggaccaagtcgatgttccagtcattgaccctcccgtatttcttccatggctcctcgccgggggcaacgttgccgtatttcttgaacagctgcaaagggtgtcaataaggtaagttgggaataaattggtgcacatactgcttcgatgttgacggaagctgcttctctgtgaacattgtgagctattttgatcttggtgccatcatcgtgagcttcgccgacttaccctccatagtgatcattgcgatcgatgtgaaggaccttgttacccttcacactgaggacactgtagtcgaaaaggatgagcaaatggtggaatcatcaaagcccaagctcaaatacctacccagacaaaacacactcggtcaggcctaaacgaaattggtcagttgttgacgttttgaggggatggcggggtagcaacataccagtgccgagcaccacaacatcgtattctggggcgatctcatccataatgaatatggaagttactagaggtagagaaaaatagagagaagattcaagagaatgaggagaagagaaagttgactatctccccgcggatcggtgagaaaggggaactatttgtcggatccgccactagtgaattacctcatgatattaatgacatgggatattttggcttcaatgaacccctgaatatattggattgtttcagctcaggggtaagtctgatttgattcccgatattcttaggtaccgggataagttaaaagggatttgtagtgtcagatgatggaccatctcttatatattctatgtataatttgacatgcgcactactaaaatcaccttggaaagctaatgttacatacttattacccctggagattcggcttaagtctccctcgaccggggctgtgtcttaaccctctggtcatgcttattgttccttgccttgggctgcttcgttgggctcctgctcgatctcagcatcatcgagcccgtagaagttctcagggcggtatccgcgcttgtacatccgcgaggcgtcctcccaagcataccagcgttcacgcagaacgtgcttgatgttcttcatggtgcttcgaatctatgatgaattggatgggtcagtcgagttcaaataatctgaaccaccaattgatggtcggctctgaagtaatgaggaaaagtcttcatgcagctttccaatatatgtagatgaacgagatgacctatacagccggggaaaaactcaccaccttgtcccgttcctgagattcaaatccaccgtagccagcctggattctttctctttcgaaatctgacgtagcaatgcggtttcgttcacggacgcatacatgccacagaccgtgcaagtcctcccaactccgttcgcggagttcttggataccccacggacgacctagattcccaacatcagcactgtccatagagcattatagattcgacatccagaaaactaaccatgagcgttgtcataagccggggtaggtaatgcctgccggttggggggaaagaaggcccagagtccatggttggggtttgtttcccgcggctgcatgtctttcggcgacacaggtttgggcaatggccattttgacacagtgaacggtgttctgggaccggttcgatggatggccgatacaccacggtttttgcttttgtcgcgtcgagggttggcgccgacggaggcagtggaagaaaagctcgaagattggatggctgacagggtcacggaagggtgaagtgacggcgcgagataagtgggaggcaattcggcaataaccagccctctcaggcggctagcaatgcgtggaacctgctgcatgattgtgatggctttccccaggacggtccgagtcggagattgatggcctttcttttcgcgaaggcggcaaggctagtcacgtgacaaaaccaaaccaagaccagcttggatgctattagccttgggttcatcgggttcacgtctttttttttcccgagtcactcttgcttgttttgattccatctttattccagcaaacgacagcttcaaaaatctatcctaaagatatctttaatctttacattttaggccttgagctgcggttaattgcagacttggcctgtgcatccgcgcgtctaatcacccaatcgactactcggcggagcagtgccgcatcaagcgtgagcaagaggcctttgtggattgctctcccctccacagattcaactccggtctattactcggccagtctgcttttctgatttttgacgtctcctggggtatcggaaattaccctcttcttaagcaacatcgactatgaataggccaggttcgtcattttctttcaatgccttcgcgatccctcatgcctttcttatcttgcacctacctccgcggaatacttgatataagtcgtacttgcttctgtgctgcgatatactctccttgatagtgggagttacccagcattgtggaagcgctggggagtccaatggcaagccttggtgcatattgttctacatttgcgaccgagacattcgcaaggacatgcccatgcattcctatggtgttgatctgagcagctcttgatgcgacgatcgtgctgacttgtcacgcgtgtgtcaggacctggcccgcagccgctaagaggcatgtccggattccccacgcaacagcaagcacaagctcgaactgcatcattagcatccacgcgattgtcaaacgggaaactgggtgcgattgcctcgagtcatactttctggacactcaagatgatttgtatgaagggatgctaacatgtgactcgaataggcggcggtgccaattggagcttcaatctacctgttagtggatcatctggcctaccgggcagtcagcaacgcacaatggggaccatgggaagctttgcgcaaagcctaggaggatctcaatccgcagcaccacttgatctctcgtaagtgctcttttatcatggtttgcagtggtctcctgtatctctaggccttccgatttgtctccgaactgactaggtcggtgattctagggagttcccttcgctatcaggagcatcacagcaatcacagtcacaaactcccggtcagctaatgtgggccaacgcaagtcaacgcgctgctcagcaaacacctgttcaaaggcaacagctccccccgacatcgcaaaccccctcccgttcctcccaaccccaaggccttcctacaccccaacaatcccaaccgcagcatgatgacatgtttccctctggctcgcagtttgccaatcgactcgatgactttagaaatggtggccagggtattagtagtcaactcggtgcaggtggccaaccccaaacaggcaatatcgaagagtttccccctttaggccgcaatgctgctgcggagcttcctctcggtcggactggttcgttgatgcaaggtgcaggctttgggggttatggaactggtctaggggcaccccggtcaccagtcagtcaagtgcctaatggcattctaggacaagagaaagcagtatgtgtctacaattgactcactttctaggcagcactaactttacaacaggacttgaacaacggtgtgcttccaagccagcgtaactttagcgatccacaacaactgcagcaaaggcagccagaaaatattgacggacaagatgtttctaatgcggctcagaatactgagcaaccacccctcgcacagatgagtgaacttgacaggtttgggctggcgggtctgctgcgcatgattcacagcgagagccctgatgttgcaagtctggctgttggccaagatttgatgacactaggattggacttaaaccaggcagagtatgagctcctttgttcccataccatttataatactaattctttgcataggcctttgcacacatcgtttgcttcaccatttgtgtcgtcaatgtcagcagtccctctggaacaagacttctctttgccgggttgttataatgtggccaatatccaacccctccagtctcgcattcctgggtttagcgacgagacactatttttcatcttctacagcatgcctcgggatatcatgcaggaactagtggccgaggaattgatgggccgcaaatggcggtaccataagcttgagcggtgctggctgactcgtgatgagacatatcctggacctgttgatgtggaacgtggtgtgacggaacgcggcgtgtatcttctatgggattcctccgcctggaagaaggtccgagtaagtaatattcatcccttgttggaacttgaagaactggttgaactaattttcatcacagcgtgaattcatccttcgatatgaagacttggacaaccggttggatcctaatcgaggcgccgcccgcccacctggcgtggtgcatcatgcctcatgatttgaacttgataccaaggcgcatgcagaatacaagcaatcaaccatggcgttcggtttactggtctgtgttatattgctcagggatggccaatagtacattaaccttcgggaacaaggcgcgttgatttctttggtattaaagggctatgtgggaaaccaggacacgatatttgaaaatcaacagcctatgtgattttgtcacaatgctgtaaaatgctatacatcgctgtagaccactctattcactacctgaatggtttatccgtctagcaagacttgcgcgctgtagacagaatagccatccaatccgtatcgatgttcccatgtccgtaagtgtcttccaagtacttctctaccgccgggcggacgttatccgtgttttcctcccgttgcttctcagtccagaaggatttcatcaacacgggaagcatcatcatgatcatctccaccaagataggggatgtcagggtcagttttgttgttatttcgcggacatcgatgtcctgaagcccacgcccctcgagctgggactcgatccaaggctttgagtgccattgcccatcagtgatgacccccaagagctttggggcctcgggaaaaggcaggttgcctggcatgctttcaatcacttgtcgggcgatggggatccagccggctgtttcatgtcagtgaagttattacccaagagaatcgttccaatacttacgttggatccaagttgagaaagcaatagtcccgccgggttttagcattccgaccgtctctagtggtttctattagccttgaatataataaggaaatgggcaatgatatacttaccattgagagccttgagagactcagggagtgtcatataggctgcaaaagggacatagcagttagccactgtcagaatagaccggagtgcatccatgaacccactcaccaaaagcagtgaagatgtgagagaattgaccgctaggtagctcaggattctgcgcatccacaatctttgtctccgtgttctgccagccctcttcttgcatacggtgcatagtgtactcgatcattgccgacgagatgtctccacaagtcaacttccacatcttcttgacagtgtcatcaagcttgccattgagggtactggagataacaccagtgccacaggcattgtcaaggaccactagaggctgatcagggttggccctggactcggcggccaccttgctctgctcaaccagcgtttccgcaaatggccgggtgaccatctccgcgcgtctaaacgagctggcatattcttcgctcttgaagaaagtattcatgtcgactttttcagccatagttggtaaactgcaaggtaattgcgtatcgtagttattgaagttgataagtgcctgtttagaaggaaccctcaatgtgatgtgatgtgatgcaagaccgagatcatgaaaagatagaggtccttatgggtccaggctgttctttaaatagtctgcggtcgcctaaagctcacatggtttctgtaccagaaattgttgtacgatatagaaagtgtccgagaatgtctccgcgagtggatttcagtcgaggcatttgtaaaaacgcaccttcaaggggtatttagtaactagaaccccttactgcgccttatttcaatgctaccaatggaaattattggttgggggcgactcttacgcagtcacccccagggttccctcttggtagatcgtgatcattatgagtgtattggcaaaagaaggagccatgcggagtcgaagtaaaagcggcaaagtccttcacggataccagttatcaaatccacaattttaatcgtcccaatgtcagttaatgcagagaggtttaatctccagtcgccgagtgccattttttcatacttcgatatcacgtgagaacaaagcccccgcgctgacatcagcaaaacgacgccagacccaaatgggcaaaccatcaacagcgggtgcgggaaaacaatcaatcccctccactccccatctggtcgacctatgcactctgctagcgagcagaacaccgtttcggagtcgcaatcatgaggattactgaaattgtcatagatgtgaggttcaacattgctccatcgttattcactgcgctaactaggtcgtcagggcttcaaatcgtacgctgtgcgtacggtgatctcgggatggtatgcaatctaccgcgtctaagcatgaatgaaattatagttttggcttaatcttgggccgatcggatttgctaatcgcgcaatacagggacgaagccttcaattcgatcaccggccttaacggtagtggtaaatccaacatcctcgatgccatttgcttcgtgcttggtatcaccaacatgactacagtgcgcgcgcaaaacctccaagatctcatctacaagcgcggccaagctggcgtcacgaaagccagtgttacaatcgtcttcgacaaccgggataccgcgaagtcgccgatcggattcgaggagtatgcgaatatctccgtcaccagacagattgtgctaggcggcacaagcaagtatttgatcaacggccaccgggcacagcaacagactgttcagaacctgttccagagtgtccagctgaacatcaacaaccccaacttccttatcatgcaaggtcgcattacgaaagtcctgaacatgaaatcggtcgagatcttgtcgatgatcgaggaggcagccggcacacgaatgtttgaggatcgaagagaaaaggcaaacaggacaatgggaaagaaagaactgaagctgcgcgagatcgaagaactgctgaaggaagagattgaacctaagctcgagaaacttcggtcggagaagcgagccttcctcgactttcaacagacacagaatgacctcgagcgcttgacccgacttgttgttgcccatgactatgttcgtggtggcgagcggttgagagttgcaggccaagagtgcgaaaataaacttaacaaagcgcaagccctcgaggataacgcgatcaaactcaaaagtgaaattgctcatttagaggaggatgtgaaacgggtgcgcacagctcgcgacaaggaacttcgaaagggtggcaagttccaagggcttgaagatgaggtcaagaactactcacacgaattggtccgactgaccacggtctttgatctgaagaatgcaagcatggatgaagagaaagagaaacgacagactattcaaaatactgtcactgatcttgaaaaggtcttgaaggagaagcgcaagatctacgagaagctacaggcccagtacgataccgccaaagccgagttagacgcacaaaacgtcgaagtggagcaaaaggaggaactgcttcaaacattgcagactggcgtcgcttcaaaggagggccaagagagtggttaccaaggtcaactgcaagatgcccgtaatcgcgcaagcaatgccgccacagaacaagagcaaggaaagctcaaaatcaaccatcttgagaagcgaatcaaagaagaggagcctcgcgcaaagaaggcaaaggagcagaacctggggcttttgcgtgatctcgaaggcttgaaatcgcaggctaacaagctagagtccgagctgactcggcttgggtttgagcctgggaaggaggagcaaatataccaggagcaaaccgagcttcagcgggatattcgtgacctccgccagcgggctgatgggctcaagcgacaggcagcgaatatcgatttcaactacgcagaccctcaccccaactttgaccggtccaaggtcaagggcttggtcgctcaacttttcaccctcaataaagatcaagttccggctgcgactgctctggagatctgtgccggtggtcggctttacaatgtggtcgtggacagcgcggagaccggcactcagctgcttcagaaaggcaagctgcgaaagcgcgtgactattattccccttaacaagatttctgccttcaaggcatccgcggaaaagattggagctgctcaagaccttgcccctggaaaggttgacctcgctctgtccttggttggatacgatgaggaagtcctggcggcgatgaactatgtctttggcaacacccttatctgccaggatgctgagacagctaagaaagtaacatttgatccgtccgttcggatgaagagtgtcacgctggaaggcgatgtgtatgatccgtccggaacactttccggtggaagctcccccaattctagcggtgttctcgtgactttgcaaaagcttaatgagatcaccaaggagctacggagcaaagaacgacagcttgcgactttggaagatcacatgaagagggaaaagaagaagcttgattccgttcgctctatcaaacaaaatctggatctcaagaaccacgagattaagcttaccgaggagcaaattaacagcaactcttcgtcttcagtatgtgtttctcctaatctattcccgcaatttacaattaacctgaagtagatcatccaagccgttgaagagatgagagcaaacattgaacaactcaagaaagacatcgccgacgctaagtctcgccaggccgtcgcatccaaggatatcaagcaaattgagaaagacatgagtgaattcagcaacaacaaagatagcaagttagaggaactgcagacgacactcgataaactcaagaagagctttatcaaaaattctggctcggtcaaggagctgcagaaggaattgcagacttccagattagactccgaacaagttggaagcgacttatccgcagctgaggagcaattggttgagtcagacaacaccctcagtgcccaactagaagagattgaaacacaaaaacgagagcaagcacggctgaaggtatgtcatgccctcccaatactgcttaataatcatataactgacaattctaggatgcccatgacatcgcgcaggctcagcttgatgacgagagggccaagctgaccggctttgacgaggaattgcgagaattagaatcagccatgaaaagcaaatcctcccaaatcaccgaggacggactagaggcgcagaagctcggccatcagctcgagaagctgcaaaaggatcagcacactgctagccaagccgtggctcatatggaacaggaacatgagtggattgcggacgagaaagaacatttcggacgcgccaacactccctacgatttccagaaccagaacattgccgagtgcaaggctaccctacgcaacttgacagagcgatctcaaggcatgaaaaagaaaatcaacccgaaggtcatgaacatgattgacagcgtcgaaaagaaggagggtgctctgaagaacatgatgaagacagtcatccgtgacaagcgaaagatcgaggagaccatcatgaacctgaacgaatacaaaaaggaagctctctacaagacgtgggtcaaggtgaatggcgactttggacagatcttcaacgagctcttaccgggtagttttgccaaactcgaccctcccgaaggcaaagacatcacagacggtctcgaggtgaaggtgtccctgggcaaagtctggaaacagagtctgacagaactgagtggtggccaacgttcactcattgctctttcgttgatcatggcgcttttgcaattcaagcccgcgccaatgtacattctagatgaggtcgacgccgcgctagatctgtcacatacgcaaaacatcggtcgactgatcaagacccgtttcaagggatctcaattcatcgttgtctccttgaaggatggcatgttccaaaacgccaaccggattttccggacgcgcttcagcgaaggtaccagtattgttcaggcgttgacccctgcggatttgaaataagcgtgcatatgatcttggttgtctatagtttctttcttggtgtccccggtggagtgggatgattatgtcccggccttggtgtttggttgtctttggatgggaatggactctctcttatgaattatgtgtaaagactatatcaatttgttcataaatataaaatcctgcacaatatgcacaatatcagtgtcagcgtcgaagactggaaacttccaaactcggaaactccgatacccggcacgtgctcgattctcgacctgacccgtgccaccttccaacgcgcatggcgatttcattgaaatcacccccattgcgccaatacctatgtgtctcacctgaacatcacctatattagaccatatccaactcagcgtcttgcctttttcaaacccgttacggccagatatcaacactggggaccttggacacctcactcaacttgcgctctgccaaaacaaaatgacggacgaggagccttcgctgaacataccgtcgcttctcactctagcggttgtatcatattttgttctccgatggttttttaaccgcgatgaaagctccgcggggggaagccgaggtagggggcgtggcaatgtcgtcgatccggcgcaggtggaacagatcgcgcagatgttccctcaactgaacactcgtgatataatgtgggatctgcagcgtaatggcggcagtgtcgccgcaacgacagagagagtcctgactggacgggggctggaaacggtacgtgttgcgctgatgctgtcatcgatttccccaccttatctgcgtctcagacaactcgactcggccacaggcttcaaatatcaactgcaaatagtcagttatcgaagcattgactaattcactttcttagcctcctccttcgttccaacctccggtcgcaattccccccaccaatatcccgctggcgcagaccgccacgcccgtacagaaagcggacgcacaggacttgatatctcggtataatttgagtgcaaaggccgagagccctgctacagagtcagaacccgaaaagccttccaagtcctcttggtcccaaaataaggaagagcgccagcggatactgcaaaagcgtcgggatgatatgatcttggcggcgcgaagaaagatgatgcaaaagagccagggcaatgtatgatatgagaactgtcatgcttgcctgccgacaacgtgactttctgtacactgcttttgacgacgataaacctggccgaacccggcaccagtgtttcccgggggccaatataccctctccatcctttcggttttgtttcgcgacatcagtcctctttgtattaaagcgttcgcatgctccatggtgttagtcaaattggaatagtttcgattataaccgttggtcattgtatacggagggtatactggattatatacatgaaagtcgttttgggcattggtctgcgtcaggtatgcaccgaataactccgaatgaaagataccgccaaaaaagggaaaaaagcaacagcctgggatgattagaactccatgtaatcttcttcatcttcgtcccgggtgtcatcgtaggcaccatttgctctctgctcggccatctgttcacgccgagcctgttccttggaggacccaattctcctatgagccaattagcaacgaagtcccccaaatgttcggctatgcaagtatccgaaaatgggatcacataccgaagaccgtccaccacaccagtaacaaacccccgctcctctcccaactccatagaaccgacacccgtcagagcaacaccaccaccacctgtcgccgcagcatccagcacatcaacacccgacctcattttcgccatgcgcacctcacgcaggtccttcagcagtctccgtatctgatccgggtccacgagatcatcgctcgcggcgtcaagcagcatattcccaacctcaacccagtgatatggtagcgaagggggatcccgtgaagatgccacggtctgggctgtgttttggggtaagaaaggcggcgctgcatagtaccgattaccatctggtgtatattgcggccgagcagatggcagtgcatcgcggtccagaacacttggttgaccaggcaggggaggaggcggggagaaagcgtttttgtagtcttggtgttgggactctacttcgaggatgagagctaatggctctgggtgtagccatgttggtgggataatgtttgcgcgacgttgacgcttgaggaggatggcgagccagagggggagggatgcgcgtcggggcggtacgagaggttcaatggggccctggggatggttagatttgagtatttcaagatagagcagttcggaggcgcatactcctagtagttcgaggccttctaggcgctggcgaggcacaattgttactgtttccatctccgccaggaaggcgatttctgacgccgtgacgccccggggaagaggaaaagccattgggcgtgtgaataggaaagcgaaggcaatttcaattaatcacgagagtcgcgatctcatctctcttaggatgatctaggtcgtcttgatcgtgcgctcgaccttgaccgtttgctctgcgtttctttcctttcgctttttttcttcctcttattagaccgtttctctgcttttaaaatgctcaattgacttttattgaatgcttctttcaagtcgcgtcgagatggcgacttcgaaacgttcaaaacgtttgaaacgtttgcatcggatgagctccacaagctccgactgggacccggtggccgaagaactgcagatcgtctggcaactttacctgcttgctgcaagtgattatttgcacagcatggccaatcctctagaatcagacctcagccggagtgctcgatggttcgttccgtttggcttggtcttgattcttttgtgggtgattcttgtcaataagactgtccccgaagcctacctcgacgaagtcttccacgtcccgcaagcacaagcatactggtcgcataagtggatgcaatgggatccaaagctgacaacaccaccgggtctatatctgttctcatatgccctcttcgctattgtgttgctgctgcgcggagagccgacagagctcactccacaggtcttgcgctcgacgaacgttggtgcgacaaccgttattttcccctggagactccagaagttgcttgatacgctacagagaacgacaaatactcggccattgggagcgaacgtgtctcataccgtgctgaatatctgcttgtttcccccgctgttcttcttctctggtctgtactacacagatgttcttgctttggtggttgtcgtggaggcatacaattgggacttgaagagagactttgagagaaaccaggaaagcgaatctggaaacgacgcgacaaaagcgactcgcagtggtattcaggagacactgggattcctggctttcgcgctggctgcattggtcttccgacagaccaatatcttctgggtctcggtattcctaggtggacttcaggtagtccgcaagattagaaagtctactacgccatgcatgtcatccgatgtgtcaactatcgtgaaacaaggcctgcagaatgaggtgtatgatcctctcgtttcggaggcttccttcgaaggtgagttgatctattggatatacaatatgacgcaagcaggagaccattctaactaaatctatagattacctgaagaccgccgtttcacttgcgactgtcagtctgaagcagcctttttctctcctggtttcggtcattcctcacatcatcgtcctcgcggcctttggtgcatttgtagtttggaataacggagtcgtcttaggtaagggtgacttgttttgtcacatcaagtgcgattttactgacagttactattcactaggccacaaggaattccatgccgcgggtatccacctggctcagatgctctacatctggccgtacttcatcttcttctcatggcctcttttcgtcattcctctgatcaatattctcgccctcaaaccactccccaaatacttgaacctcggtctcccgccgaaacagaggaaatatcccaagctcaaggctgccctgattgtgatcccgtttatgcttgccgtggtccacttcaacaccattgtgcaccccttcacccttgctgataaccgacactatgtgttctacgtattccgcattcttatgcttcacccagcaatcaagtatgctgcagtgccagtgtatttcctctgcggatgggtcgtgatctcagcctttggatttaccaccatccaacgtccgcccaaaaccttgcgagttcataaagctgctccagatgcgcccccagctccgactccggccccggatccagccccggccccagtggcacaagagcccaaatctactcagtcttctgcgcgcaagcctttactggcgcaccaacagccaccaaagggaacgaagaagcctaacaggtctaattacaagaaaatcaagaaggatgacccagaaaccaagaagactgacttgactgagctaccagcggagattacggatccaaatgatcccgcggttctggctagagtccagcaacacatcttcacgcgccagagagaattactggaggcaccacgcgttagctttgtccttgtttggctggccgctacctccttgtctctcatcacggcaccccttgtcgaaccccgctacttgatcatcccgtgggttatgtggcgtgtgcaccttcctcctacgccatgtctgttcagggatcgagatattcgcccccgcacagaggaagctaaacgtcgctctgacctcattgtcaacggaccgaagttcgtggagacggtttggttcttgatcattaatttgatcactgggtatctcttcctgtacaagggctttgagtggccgcaggagcctggcaagatccagcgcttcatgtggtgatatctctgtatctttttcttttgatattagttttggcctgccttggtctggtcgcttgtacaatagaaatctaaatttgctagtttactcttctgaaagccattgagttttgttgtgatattatcttggtgtatccaaagcgagcttcattgtgttcggtgatacctacatgtcccgcattccaatcaactatctaccaaaaatagacactcttccattccatcgtatcgtcaattatgtctactgctggctcttccacgcggtatatttgcggtaaatatcatggcggaaggtttgctttagctcggccaccaactctccatcgaccggcagtgctgcctggatggcaccgacaccacagagattattcttccgatcaatgaaccaagtgagagtcaaaccaccaccccaagtcaacgttcgctccccataccagccgtcaacatcctcaagcgtcagcaaaccgccaaggccatagccaaccttcagctccgaatctgttccaacgcggaaaaagggcccaagaggactagcaagcgcagcttgatggcttgccgccgcctcggggccaaggtgttgctgaaacatattgtcgacgacagcaggcgtgagcaacttgccatcattagccagcagcgagtgcagaaccttaacaaaatccgagccaggtaagaacagtccatgaccgccaaaggcaccacggccccgcaggttcatctcgccgccaccgccgagcacggcactaccaacagccccagggtcactgggattgagatcgacgagacgggctcgcaggtcctcacgggtagcgggatagaactgagcatagttgataccgagcgggtcgaagatacgcttctgcatgaagtctatcagcgagccgcccgtgacacgctccaccacgcggccagcccagtcaagaccggggccgtacatccagccggcaccgggctggaagctgagcgggtaagtgaacatctcctcgacgaggagagggtcgtcattctcgggattcccaaactgcgcgcgccacttggcgatgggcgggttcaggaagtggtaggaggtgccggagctgtgcgtaagcagcatcttgagggtgatagggcgggctggtgggtcgagctgagggcttccattgtcggcaaagccagtgagaacttgctttgcagcgagctccggggcgatggatgacaggtcgccgtctagacttagtaggccgtcttcgacgcactgtagggcagcgatggttgtgatcaatttcgtggctgaggctaggtacagcacatcgtcgagctgctgtggctgcttctggcctgagagtagagtgcgctctccgatcgccttgttgtagacaaagtggccttcggcatcagtggcacagataacagcgccgttgatcttgccggcgtcgatggcggattggatactagcttccatattttttggtgaagatgatattgatacacagggtctatcaagttagcaggagggcttaaataactatgtagaatacctacaacacaggtatcagttcggcgtctatttttggatgctcgggctctcttttgagactaagtcaaaaggttattgtagtactccgtacaatatacatcacatttcaggccgttcccaccgcctatattctacctataacaccaataaggtggggaaagacatctcaacagaatgtctgatctgagaacatctaagagcacaagcaaaaacacaaccaagatatacaagtgtacggagtactccgtatatgtgtgagaactgtgaaatagcgcccaggcactacagatcaaatatgttaggcggtctgattctgccggtcgaccaagctgttcaccgatcaggaaggcggtaccattatgcagaaaagtggggttatattgaactgtaaggatgtcctttcgcccttcggggcatacggtgaaaagaaaatatacagagaagattagcatggcccctgcactaaggatgacacgctcaatcaaagagaagtaacccattttttttctcttttacacgagctcaattgatgagatagagtgcaggctctttgtatacattattctactactccgtatatatttgcagatactacgcatactacgcatagaagtcacgtgttaatcgccgttcgactctgcacgttgtcggaaatggtggttttatttaagctctaccaggttcacctgttaactcctacccccaaatatgagtacgctaataggtgttcctgccctatccaagttttgtttatacattcattctcattccattgtttgtcatataatctgaaatccaggtaggggccaaagtggtgcactcttccgccagaataggctgtgaaaaaggtgtaaaatgtgtaaattgaatttgtctctgcgatacaccaatagtatcgttgatccgacgatcatcagaagaatataaggagccaggtttatattagtacaagagttcaaagtatagagaatgatttggagtatagaaagcaagctatggagaacatgtatcactgggtatactccgtactggggtctgttttagaataaggttgttttatgtgggtccgctaaaaggatcgaaccagggtcccagggccacgggataaccttcgaaagagatttatatgaaccgtgttaagatattcttttgagacggtatatgaacttattcagttattcagtctagaatatacttcctgcatccgttgaatgtcatcgaaattgtttcgttctcatatttccaaaacttcataacggactagtcattaacatgcaaaacccaacagcaactctatttttttggcgcacacgaaacggaagattccacgggtatttgtgtccacctagtcttcatccatcgactcccagccatcaccaccacggggctcaccctcatcaccctccccctccgaatcatcagactcgtcatcatcagcattgataccaaccgtgcgctccgggacatcaccagcaaggtcaggcatgcgagacacaaaagcacgccgaacagcgccgttagtcgaagcatcccagatctgcacattacccttgctaccagcaaccgccaaccggaagctgacctcctggtcgggcgcgaaggtagtagagaacaccttgccgacctcaagcttgcgcgtgacaaccaaagtgggcttgtcattctcgacgctccacagcttgacggtcttgtctgttgagccggtcaccaaaaagccggggatagagctgttgatgtcgaaggatgaaacggaggagtcgtgtgcttgcagagaccagacaggcttggactcggcaggggtggcggggacattgcgcatgtcgtagcggtagaccatgccgccgtcggtggtcacgtagaagaagttggtgtcatgcgggtcccagcgcacacactcgacgtctgcgtcgacgccccagcgcgcctgggcgtccggcgcacgcatgtctgctgccactacggtgcggtcgtaactgccgcttagcagaatggtggactcggctgggtgccagtctagtgagcataccttgtccttgtggttggagtaggacttggcgcaggtggcggtgttgagatcccagagcttgacggtcttatcggctgatgccgaggcaagcaggttgcggtgctgacggttggcagccagcgccaggacggcatcgatgtggtactcgtcgttggccttggccttcttcttttgcttcttcttcggcttctcggcgtcctggccaccctgcccaagaatcgcgttggggtacatgcagtccactacatccagatcccagatctcgatatcgggctccatggttccaatagccacgaagtttccttgcgtccgaccttctgggttcttgccaacaggaatatcaagccactctgtgcaaagtgggataccgggaagcatgatgtcgtggtgcacatagaggttgtccgctttgtcttcgtagacgtagacttccaagtgcgcaacttcgtcctccacctttccggccaacagaaggttgtcgtagggcataatctggagctcctcgcgttcttcatcatcctcgtcttcggggatcacgaggtacgggtcttcctcgttgggctggtggtaggccagggattggacattgccgaacatggtgatcttctcgccatcttcatcaatctcctccttgtcgtagttatccatgtcgaattccttcaacacatcatcatcactgttaaatccgattagcatgagttgaatctgcgctgcgctcaacatcactcacgtctttgaatcggtgtccttggccgaggtcttctcctcagcatcctcctccatagcatcatcgccttcatcttcagaaccatcctgggcagcattcatatcatccttcgcatcctcgagctgcatgcgcgcaagcttagatatacggctcatctcggcctcgtcaatctcatatttggtagggaactgggcggcgacaccacgccgcacccatgtcgtagttgtaatcatggaagacattatgaaaatgttgtgacgaaactgatcacacccgtccactttttttctatcggcgatatttttttttatcgtgcctgaggggctgtccgcccggcagaatccggccgatctccttaccgcccggacgttttgcgatgttcttgctttgcgttgatcatacgattgaacttgaactatctttcagttttcagagaccagtgccattgaaatcatgcattctcatctccatacctcttacaatgccagtacgtcgagtccaccatgcccggaagatccatctcgccatcccatcccgctttccatattgactgatatcacacagattgcgaagagatcatgactgctctagatgagtgtcacgccaagggattcctacacaaagtcatcgggagctgcaacgatattaaggtcgacgtgaacaaatgtctctccgctgagcgatacgagcgtgcaaagcgcaaccgagaggaggcgcgcaacaaccgccggcgtatggaggagatctgggccaaagagcgcgagcttgatcaagagcaaggagggcctgcgcttgcggctgctagggcggctactgcggcggcggcggcggctaatgctagtgctagtgctgcgaagcaataggctgtgtcgtggatgagcatatgctatcatatatgccgtcatgtttgggactggagtttggggtctgctttcaatggctgttcttcgatttggctcagacttgaaagacagcactgctgcttgttattagtagccttcggcatggccccgatttcaatatgttcacgtgagaacattgaatgcacgggataagcagaccgaggccaaattatctccttttatttcatctggggaagaatactttgtacgatatctgaacgttgaaatgtacatatagccgagtgaccttcgctctgtcttctttgccatatttcatctggcaccaatgtccaacacttaatctacagtttgttggggttataggatctcttgaatgatatcagatgtacattactattatgcacatcagctgaacttttagatataacccatccgatctgaacgccgcaccccagaagtgaaataaggttgagaatgcatgcaatgataaccagcatcatgaatcgcctatgccgtaaagattcaatcaagcgtcaacctccgtagcctcattaggctcggtggcctcctcgaagtcttcacggggaccactcttagcatgacgacgtttcctcttgggcttagccgctgcagtatcatcgccatcatgttgctccgttgcatctgcgatatcaacctccttccgagcaggcttatccttcttcggtgcaggcgcatcagtcttcttcttagccttcttcacactgagaggattaggcgccttgaccctaggaccgcgcttcttcttaggttcctcctcatcagcactctcgccatcagcctcgccatccctcttgcgcttgcccagcatgggatccgcatccaatccagcgcggaacttcccacgctcaacaccatcccgcaccatctcagaagcgctgctcatcggctcgaggaccataaccgagcgcttaacgtatatgataggcacacctggaatagagcgagcgccggcgcgtaatgcgcgggagcggcgcatagcctcctcttctttacgatcctcttccgtcttccgtctgcggggctggttctcgctattggtcgtctttctcaagattggatccgcacatgcgagaatgtagtgctccttgttcttctttgagtctgcgttgggtgaaagcagcgagaggagacactcgacttcgtcgatgggcgtggagtccgcgttgtgcgagcagtggcggagcgggagttctgtgggcggaggaaggaagagaggtcggtatggcttttcggttttggggttgatgggttgtgcggccatgatagcggcgagtgagcactttgttaatactgtcgagatggttagctgggatgtgtcttggtggatgggaactttgtctggtgagactcacgaggcttgaccttgccttggatcgttctttcaagtgcagggattagttccatcctgaaggagtcggtggcgcgaaggaaattcgagtcaactgtttgagcgcaagtcagtactgtacaccagaacaatatattgaatgggacatacccaggacctgataggcctctcggaaaccgaaagtgagctcatactggtgcataagcttgcgatacttctttgaacgtttggccctcattgtgaatgatgggtatcaagtatttgaagattgaatgcagcaaaagacatgagcttctgcgtcgaccgaaacttttttcattctgccgggcgggagcggcggtgatgtggtctgtgctggtggtgaggtacccaatactttgtgaagtggggcgtctagccttgagattgagtaccctgtacttagcatttactgatcgctacagacttgaatagttatgaaagaatgtattgagtcaaggaaatattattatttgtcttgtttagacttaagtagctatcaacgatggacagactagccacatcgcgctaagtaatggagtccctcatgggtgtaaatcgaaggaaatgggtctcaaaagtggtagaggggttgttataggaatcaccagcttgaccggttggcatcatggctttggtgcaaaccgccaatgcacaatgtgcgcttgttagaaagttgcccgagccgatggaagataccaacaggtggggacatgatgaccaggcaaagctaagcaatcaagcttcgcgctggagaactcgagtaacccagctggcatggaagccatttcccgtggtttgatggggtgagtatttcactgcaatgcatgtccgggtcctgattcgacgcttgcaaggcatcatagctgcgcaagagcgatgtagttgggacaagcttttggcggtagatatgtgaatctagatgatagacggggaacaagagcttgcctcgtgtgtcgaggttcgtcaatggcaattggcgcacgtccgaggcaaggagatcaagacgcgaaattcaagatggatatttgtgaaagtctgatcgtaaaaccaatgggtgcatctcatccatcccgtttcttgcaagatgcaaccacaacagagatatcgtccattttccctccttgaatagccagaccctcatccactgccttctccatgtagggactctccgcaaagggatcctgggcaatcgtgagagcagcattgagcagttccctagcaacatagacattgcggctatcagacagatgagggtgctgcgcaacattcgttggcgccgcgcgctcttcctcccatttgtcaatactgtccataacgatcttcaggacctcatgctcccataggttatccatgacgccatccgagaaggccaggacgatgtcgtcttcctgtacctcaattttggacaagactgcatctttccggggtgtgtcgatactgtttgttccaagctgcatggggcaatcgaaccaatgccactgctcggctgtgcggaaaatgacctttttctcgctcggtcggatcacgaggattttgcaatcgcccaggtttgtaacgtacagcaatggcttctgtgtgccgtcttcgccctcggtccagtgtattatggcagtcaccgaggttgtcgtgccgagccactcggtaggagatgtggttgcccgcaaggtctcctcgaatgcatactgcaggtatccgaccgggtcgatggcaggcgtgctgtggtcgacattcctttcgacctcgagggcccagaagtgtaataggagtctagaccagagtctgtatcggggaagagaaaagtcagcgatcgtggcatatgataaaaattgaaattgagaccactcacgcagcatgaccacgaggtttcgtagcccaggcgcctacgccatcgttgacacctatgaaattctctgcgacgatgatggcatcgtctccgttgttcaggccacggattagctcgccctggacggataatctcttatcctggcttagcccgtgtgtcgtcaaaggatccgagaaggatgaagagggtggggagaggaaaggtggagggaagggtcgtgaaggtcgtttggcacatagagcgtagccagtctcgaatcgaaaaggcgatttgggagaaccgactggctggtcgggagtgggagtggtgacgccgtaggagggccacactgccgccgcgtgatatggccgtgctgtgctcggttgtcggaggcgggcactctggactgtggcttgatttatgcttatgttcacgatccacttgctaatggacgtccatgatgatgatagtgagtgtgacacggctgctgccttggtcaccatccctaacttggctctttgtgcaccaagatgggctcggcgaaggggttctggggcattaaggcatgaaaggtgcaaaatgaagagacggagtacaagagaacagtagaaaagaagttttgactcggacctgggcttgagggagagaaaagaaaagtgcgactcaccggtaaaggccgagggtgtctcgaagatatcactggtctgcgccgccgactgtgccttacactacgtagtatctctgagaatatgaaaatcttagaaatcgcgagtttttagggttttattcttcttcttacttcattctttcattctttttctcattctttctcttatttccgttacatttgtccagaatctatctttttttcagagcagttgaaccccgccactcttagggctacatccacttatctatatccctgccgatccaatgatccgctcagaacttgtcagaacctgtctatatatatccctgattcgccctattgacacatatgttgcagaagagaatcgagagcaatctcatagttcacatgctatcagccaaatcagagcaactacatcatgacctcaaagtgaaccacaaaagcacacatagcgaggaatccgatgctaacccagagagcccaataattctggataggaacagactaatgatcatcggccactttcgcgggtggcttcaagcagcaaatctataaatgtcttttggtcttcatccaattgcgtcatacttaaccactactactatatgataggcggcggcgaagcctgagcttccgagggaccctgtcatgtcacattctctctgcttcattggtctctttacttattctatcatacaggtactcaccaagaagtctttctctccttattcttatactaaccttagaagccttctgcgaaagaatcatgggactctcgaataggagtatgacttggcacttcgcgggcgaaacggatgtctgtctacaatacgggttaaacacagaatatctcttccggttccgagccatggacttatttcttgcagagcatgccctacttgaagtaacgcagtgtgaggaaacgttacaccatagggttatagccttacagaaggctacagctatcgagtctaatagggcccagcttgaagaagcaaataaacagctcgaagaggctcaagcgcaatacctagaaaaagaatacgccctctatcaagcagagtatgcccttgatatgcacgctaaagatgcttatgatagcttaaggcgtgatgctaaatggtttatgcgcgaagaaatggttcaggattgttcggatcgaggcggctgttgtagccgggaatgtggatgctgtgaacagagattatctttctgaaaggaagaaaggtagaggccattgcactgtagagtgcgggtgctgtatcggcttacgaggattcgagctttcaaagaaagacaaagaagaaaggagcaaggacttgaaaactagtcttgaaggattgtattcggcctatgctttacatttggcaaattgctatttttgcccattaaggaaaccctggtctaccgaacagatcctcatcatatgcttcatgtttacttcctcgcttattggcttacttgctgttatcttgtttacttgaatagattgtttgttagatagctacgcgagaagctttgaggattgcaacatttgcaaagtaatcaactggctgcttccaactttacagcttgcttcttctttctctccatcttagtgattctatattgaaagcgctcttctatctttgcaagacctggcacgtcacaggtgcagtgagaaatagttatgatgatacctataccttgctttagaatcatttgctaaaataatagactctttttattgtaatctatacctactcactatgatacactcggctgcatagatgtgttcgtacttacacttgaaagaaaccatcgccggtatgatctctggttcttcatctgcagaacctcaagaatgtcagcaaggcccatccatctatcacaccgcgataaccattgacggcctgattggtatttccagagacggcaaacctgctcttaacgcagatatggtccagtctgtcgacccatctacacaggatggcatcgcagttgtcaaatagcgggagtgtccgccaaggcgcctttattcgtagaggcgctctaccagtgcgggttgaacgctatcgatggcagccatagtattctcgccccggctatgtccacctggtacctctctgtagacattagagcagaaaccaaggaaatcaggaatcaaaattccattaatgataccaaacgaaaatacaaaaactaacgagtccttgggaaaccatggttatataattaagagacaagaaacaccaaggccaaaccaggccaaaccaatagtatgcaggtacattataagcagggggtgacggcctgcgggaggagaaggatgagcagatccaccatttcggccggttccggggtaggcggttggaagaaaacaaaacagaacataatcttttctgaaatatcctcttgctagtgccgtggccgaggtattggaagacgtaggcagcatacagaaccaccccgaccacgacaccacatccttctctcaacgcctaatcactgcccttgtctttgagggcgtggaagatgtcgggaatggttccgacatctccgggctgaggagccgggcggcatttctgcggtggcacggcaaactccactgactcagagtctgcgttttgcactaggggaagatcgtcactggcgcagttgtcgtacgggacgataagacggggaggggtaggcttcttctcttccgcttcctgctcgcccgcgtccacctcgcctgtcgcgggggactgggccgtgcctggctgaagagagagggccgttcgggctagagacaggcacttttagtgagtatatgtctctcttccaaggcctacacctcccacgggtactttcaaattaccccaccaacgactttagccccagctcctcatccttctgttcgaagtaattccgttggtagttctcgagggccctctggccatggaacctacagacataaccttcagcacgacaggcatagcaagagagaacgaatgagacatcacataccgcaccaccaatatcaaacccaaaaccacaaaagcgaggccaatgaggctaatgaggggagctttccacggttgtgggtatctctccgggcatcggcattggttggcattcgactccattttgatatgatagatgatgtgacttacaggcctatagttcacggggggtattcctatatgcccataagcaggtgtgctcagaggcaggtacatctgggggcaagcacacccggtccttcagatcaaagtgagtatcgcttggtttgatctcaccctcgcctacgggcgactatgtgtgccaccggtacacttctaaggttgcatgttctagatacaattgcttcaacttgcctatcatattcaaaatctataaattaattaacaaaactccactagtgtatgcttcaactggtacattttctatctaaagaccaacaggtagtacaaaaaaaaaaaaactaaaagtcagagaccctaaaaaagacatcagaaaagccatatatggaatctgttaatcatactgtcgagtcgtaaacaattgaaccgtaggtaagcctgataaatagaggaggctctagatcccgaccaatcaaaatgcaattatctccagggttggccgaccttattttgacctcatctccacagaagtacggtttgtctaacttcggctgcatcttaaccggcctggcaccaatcgtcgagctgactggaagctggagagagcttcaaaataccacaagttaccggcgaagattatttcctcgtcaatactaagctattattattaaggcaggggattagtgaagcggggtaatccaaaatctatcacttattatgggtccctagcctcgtgctctattgttgatgaagttaaaccgtcggatatgggataggtgagtctgtacataacatggaatagcatctgggggttaatcaagattcattttgaaactggatatgtagacttctcgtggtcacttcatcaaataaatgacatggttcatgatcagtttcatatctgtcaaatgatattatttccccttggcttccccttgcttccctccgattgtttcttaacaatcccccggtgggattgactaaccgttccttctttcctcctttccgttatgactttgaaacgcggatgaagagaacccatttctctgggaatcctcgcttgtagtccatcagctgagctgaaatgtgaatcgtaaatcgtagtcgtagctgtcgtaatcataagtcgtggttaaagtgacaggactgcaatcttagaagctttcctgggagcctcccctggaagtcatctcgcgttcccttgcaatcaacagagaaaacagttcaaaagcatggttcaatacattggcgatatcagcagccttgacatcacgtttgagctcagccaaaccttcgaagaacatgcgagcagtggtagaagcagtagcagggaaagcaggagctggtagattccgtctgtatgcaagaccacgcttggtcgccatgatgcgtacatgtcgttctgcacaaggacagtcgcggcgattcttgtcggtacactcccaggaacatccacagatagagttgcaaatgcactttcgtcgcctggcaaggttgtaaagtctagggatagactccgtcctgcgcaattctccgatggttgttcccagacctttagcagtatccgacaagcggttatctttcacaacatccgtgtcccagacagtcgttggcacatcctccaaggggatccatggcagctcctcgaatggaacgtcgtcaggcggaatactcactggagtcatagtgagatacttctccgacattactgccatggtctctgctgggataaggtcaaagaatgggataagtcctttccatttctgacagtaggctccctgtctgtaggagacagtcctcattgcaaatgggcggtatccgagggggtcaaagaaagggacctcattctggctcttctttttcataatctggttgatgtatccttgttggaagtaggcgatgatgtctgtccgaaggattgcgcagatctctggagagtctagtacttccttgaacgctaggacgatgcggtagagatgatcagcctctggcataaggaatggcatctcaacccgcaatgcactagtgtcgactgggtaggaaccgcagagctcaatgcaggccagctcaattgttatgcgcgcatatagggcatagtaaaggttttcgacagtgtcaactagcacagcaatcttctgggagcgaatgttttgctcgctgcgtctgatccagtatggcagaccggtctggtagttgtccggctaagagtggaaactcggcgttagctgttatatttccaagaaaaaaggcgtaaaagtatgggacaagagtaaagttgtaagctcaaaatatacctcggcgccgtaatacaagaggataatctccatcatcttcgacattgtatacaacttgccgaaaatgcgcacgatgacaccgagatgaatcgattcctcaacaggatccatgttttcggggaccacgagcttggttggggttgtgggcgagggcactgatgggaccatgacccaatcgtcactgctgacggtgtagaggcgaaggcggcgctggccgctagatgcgagctatcataagtcagggtcaaatctctcaaaagtgaaaccaatgcatgacgtcaagtcagttaccaatgtctcagagaatcctgatctgtcaacaagcgagccaaattcgaagggtgttcttccctcagatatagtggctgaagttgaggagatcattgaaggcatggtcaagctgctgggagcttcggccttccgggggtgatcggtaccgtctgagactatggacaatgcttcctccacaattgactggcagtacttgtagaaacgttccttcatccgttcaatctcctcatgtggaggggcctctccatctttgacgcgggcacaagcctcttccataatggccttggtggcctgggcatacgcatcaatacagttcttaccccgttggataaacaaatccaagtcctttcctgacttcagagcattcaggcgagccatggaaatggtagaagccattgctagaggatcaagattggcattgtccgccatggggacagttgggagaggagtgggtgggaacatgaattcagaataaacaggggcatcgtccgacacagggcgctggaaacgaggataaacaagctgtttgtcctgggcaagcgcacggggagtctcttgctcacgtgtagcttgagttgcagactgcgaagactgcgaagactgtgaggtctttcgtagtttgccgagagcagctccccatataccaggtttgtggttgttaaccatgttgaatttctggtgtttttgtttttcaatcacagaatctttgcagtgtgggattgtgggagaaggaagaaaggaaagggcaggtacgtgggtatttatacttgcccagatcatcagtacaattgtccactcgctcgatcacatatggcgaacggtccatatcaggcaggcgcgactcacaacggcaaacgccgcaacacatttaaccttaaatgggcaggaccaactgcgcgcttcgaagcctgacgaaacattgtgcatataatgcaagtattcatagatgtaaataggacatgatttcgtaaacgcgttcttcgaacactggaagcgtctggagaacctattcgagtgttggccaaccttataagccaaccttataactgaaagcacctaggtagatccatggatgtgtgatgtttgcccaatatatcggcaagccaaagccaacacctttccaagtcaggtccgtatgagactatcatcaacgaagtgaagcaaggataccggacatcatcacctggtgcttgtggggcctcatcttcatcccgagcttagctttggcctctttttcggggcttgtctcggttccacgtacctgtaaggctgatgtttccccagccgggtgcttcagaggctgaaaatctggagatcgacgcagttcaatacaacatgctatatacaaccaccctaccagcttatcagaaccggagactgtcttctaagagggcaacatgaacatccacctgtgtacgttccagatcgcctaggagcaaatgtgctgctaggtagcatgggaacaaggaaaaagtatataaacaataacaataaacttgaattggctcatacaaacaaagaaactcaaggctctaaccctgcactcggaacgtacgaccactagcagtcttgcgttcacgttcttcattctctggccgggctcggttgagcactgttgcgagttagcagtgaacatgctttctttgctcagacgatacataccctggaggaaatccgctgtccgcttcctcattcgagtgtggatgtaggcctgcaaaatgtttagtgatcaatccctcaacaagaccgagagaaactgcatacctttgaggctttgatgtggtagtggaaataatcacggaaggtctggatgtgagagatgttttcataacgacgctgcggggtcaggtgtcgagggaaaagaactgcaagccgagtcagtaataaaatggagattgatagcgcaatatgcatccataccgaaggtgacatagctaacttcgcctccagtagcattcagaccaggaacgtttgcaagctcaagaggagggtcgttacggaacaggacctggggggcgttctggagtgtcaagacacgtcgccgggcgtcgacgaattcctatgggctgtcagtcaggggttctcataaatggaccacttgtggcaaagtacgaacctgcaggaagaccttgccaaagatccggtctgtctcctcgcggaatacggtgctgaagatcactgtgactcggtcccagttggccttgatatagatggcctcctcttcacggtagtgaatagccataacttcaccgccctcctggataccctgtggtgctgactctgaggtgtacctggaagcctcctcggcgagcttgttgaattcgtcgaatgctttctcaaagggagcagccattgcattccgtttcaggagggcaaggttcataatcaggtcatttcgggcctcctcctctgcgggcaggttttcaagatcgatttgtaccgagaaatcatagccaggctccggagatacaatataaggaccgtattctctctccaacacctcctgagctccatactggaccagttccttgtagcatttcacattgatcgagatgagaatcttggtcttagactcgggggtagaaaggtgaaatgtcacaccgtcgaagtcggaaaccacttggtcaatggaggttgggggtgctctgagttcggcatgttagctgggtgcctgcttcggggttgtgtatacaatgcgcaggatcgcatgccgagggggaggaataaaacatacccagaaaagcgctccgtaaggagtgactggatcaaagcattctggtaatctaagagaagcatgacgggcaggacaatggatggtattcagtgcagataggtggctgttgtgaggtcgaccgtgatcgtcatgggcggtgggggagccggagaggtcgctgtcgccgcccgtattaattttgtcctatcgatagcaatcggagattccaaaaattttcccatccaccctcaacgatggtgaaatcatacttgtacgtacgattttaagtgatttggaatcctctgatctaagcgctaacccttacacagtaagttcgagcattcgaacacattcgggctcatcgcctcggcgtcttcgaatgcggtttgggccaaagatgaccagattggcattgcacgccagacgggcgccggacgagcaattgtcggcgcaggtgaggaagttctatgttgggatgtgaagaagggagaactccttggaagatggcgcgattctgcctgcagagcgcaggttagtgtgatcactcagagcatgacagatgaagatatcttcgcggttgggtgagtgtcctctggtgtgacctagtcggatgattctctctaactattatgtcccttctcagctacgaggatggaagtattcgtctttgggattcgcgcaccgctacggtcattatttctttcaacggtcacaaatccgccgtcaccaagttggccttcgacaacgccggtgtgcgcctcgccagtggttcgaaagataccgatatcatcctctgggacttgatcactgagactggtcttttcagacttcgcggtcacaccgatcagatcacatcactacacttcttgttcccctccccagaattgctcactgcttccggattgaatgaacactctggattcctattgaccaccggaaaggacgcattgatcaaagtatgggatcttgcctctcagcactgcattgaaacacatgtggcacaatcgaatggcgaatgctggagcttgggtctttctcctgaccaaggcggatgtatcacagctggtaatgatggtgaacttagggtctggtcgattgacgaggcggctatgatggagatctccaaggagaagctgggcgcggatggtcgccgaattctcacagaacgaggaactttctaccgacatggcaaagaccgcacaattggcatccgattccacccccgctcagactacgttgcattccatggttccgacaagtcagttgaggtttggcgcattcgctctcagtcggaggtacagaagagtatggcccggaagaagaagagaagaaaggagaaggaggctcgcaccgaggagaacgcaccggaagaggataacgataagcccgaggatgtttccgccgctcctgtatcagaagtctttgtccaacatgttatcgtgcgaactggtggaaaggttcgttcctttgactggatgaccaacaagtcaagtggcttgaaccttcttgccgcaacaaccaacaaccagcttgaagcctacaacattgttccagcgaacaagaagaacaccgacagcgaggatccggactacactcggagcttggcagtggacattcctggtcaccgaacagatatccggtcaattgcattgagctccgatgaccgaatgcttgcctctgcttcaaacggcactctcaagatttggaatgttcgcaccgaaagctgtctacgaacacttgagtgtggatattccctgtgttctgcattccttcctggtgataagattgtcgttgttggtaacaagaacggagaactcgaggtatttgatatcgcatcctcaacattgctggatactatcaaagcccacgacggacccgtgtggtcacttcacgtgcatccagatggcaagtctatggtcagtggaagcgcagacaagacagccaagttttggaacttccaggtcgtccaggaggagatcccgggaaccaaacgtaccactccccgcctcaagctggcacacacaaggacgctgaaggtcaacgacgatatcctcaacattcgtttctctccggatgcacgacttctagcagtttctctcttagacaacaccgtgaaggtcttcttcgtcgactccctgaagcttttcctcaacctttacggacacaagcttcctgttttgagcatggatatttctcatgacagcaaactaattgtcacttgctcggctgataaaaccgttcgactctggggtttggactttggtgactgtcacaaggccttcttggcccacgaagacagtatcatggcagtggcattcgttcctcacaacaaggatggaaacggtcacaacttcttcagtgcaagcaaggaccgcatcatcaaatactgggacggcgacaagttcgagcaaatccagcgcctcgttggtcaccacggtgagatctgggcacttgccatgagtcgcactggtgatttcattgtcagtgccagtcacgacaagagcatccgcatctggcagcaaacagatgagccgctgttcctggaggaagagcgtgagaaggaaatggaagaggcttacgacagcacactcaccgcatccctcgagcaggaggacggcgaggacggcgagaaggcggaggccgtcgatgctggcaaacagacgaccggcactctcatggccggagaaaaaatcatggaagctctagaactaggcctcgaggatcttgaagtcgtacgcgactggcgcaaagtcaaggctgccaaccccaacgccgccgcgcccgatcgtaacccagtttacctggctctcaacaacgtctccgccgagcagcacgttctgaacaccgtccagaagatccccgcagctgcgctccaggacgctctcttggttctaccattctccaaactccccgctctcttcaccttcctcaacatctgggctgatcgcgaatggaacgtgcctctcacctgccgcgtgttgttcttcatcctgaagacccaccaccgtcagattgttgccagcaagatgatgcgccctatgctcgacagcattcgggtgtcgctgcgtcgggtccttgcccggcagaaggacgagatgggcttcaacctttccgcattgcagttcatcggcaaccagatccgagagcagagtgtcacggactatattgatgaggatacctgggaggagcagcaagcttccaagggcacgggcaagaagcgccaatttgtcagcgttgcctgagtttaggattaggtttgtgtacaagcatgtctactggcgttgtgatcattttcgacctcattatcttggaggttttctctatgttggtttccatataaaagttttatatccttgggagttgaagagaatataaggaatgtatgataattcaatttcgaagtgaaatataaccttttctctgggataattgtccactgaaatttcatagacccaagtgtatcaaagtaatagaatgattcattcaattggtctagctattatattcccctacgtgcaacaatccaagcaatccataataccggaaacgaatataaaatctgaattgcgagaaacatcgttagcgatttactccaagcaatgatctgtccaagaccacaaagaaacaacaagcatcaaagactctactcaggagaaccaatgtaagcatcgacgacagggatttcagcccctgtcatacctcttccggctcttcctattaaaattccggttctaatgcgaatctcatcatgatagagtctgtttggtgcgatgtttcccttgtagtcctgtcaggggagtttagtaccacatacctattagtgggttcttccagcttagaccgaaggtcaatctcatttattgatcttggcccacgctggactttggtgttggttggagctagagaaggggaaagagtttcgtcgggagttttgtgagaaaatttggcccggtggagctttcttagtcattctggtcacgtgttgcttttgtatggggctctactctacctctatgtactagtggatacggaatctgtataaagatttggataatgttcaatattaaatcattattcatttatataccggcatttatttcataacggtcatgattccatgtacaacacatgtggtggtgaaaaatctcgaggtatgatcaagaggacggcttcatagtcccacagcaagaacatgtccaccattgggtctccataaagctactgcacgagatgcaaacccatccaagaggcttcttatctgcaccccggtccaaagatttgagggtatccagtgcacgggttcggttcttgaaaacaaatgtatccccgggattcgctttcgcctcttcctttcgaccaagagataaacgccttttcttcaagtttcgtgactctgaacgcactggctgggtagaatggcgaccagaggcggacgtggatggcgtgttggtcggaggtggtcgttctgctgcacaggcgtcacaacataagaaggtggacgggttctccagcgtgcatgttgggcagatccagggtgtctcgtatgagctgttatcggctgtgagatcaacagcttcattgcgatctgatgatggggcttcttttggaattacaggcaaatcttcggagacagcaggtggaatgtcggaagaagcaggtggcggtgatgattttgtccgaggtcctgccgggtgttcttgacttggcgtaacatatgacgactcatatttctccctttcttcttcctgtatcagttcaatgaaggcctccatgatggcccgctcgtttgcgtcatcttcctcagcctgggttctgaacccatgcgaggcctcttccgcaagttcagtgcttcggtctgtaccagaagcacagccctgggtcacttcaatacgccgctgggcagcgtcagcccggagttttcgcatatctgttcctcggagcacgcgcgtgccgcctagcttcttgccagaatttttggcaagaatccttcgctgttcagcagcggcacgagcttgacgtcgagcttcatccagcggaattctttgaccacccagacgctttccttgagataaaaagccctctccagtgtagccttttcgggctagttcctcatgctcatcgcgaagttgattccacagcgcatgaaactgctggttgtgaggaccgaccacgttgtggcagagtctaagattgattagattttgtatttttaggagatttagatttcaaatcactcactcatgaagcatggtatccaaaatctgttcaaaggggagaaattgccgttggtccgagggataccgcaatcttagacaaatcttctggcccgcgttgacgttcagacccagcaggtttcgctgccgcggataaaattcacagagcgtggccactctccaggcgcgctgtcgcatgatcggtttgaccaacgatgcgactttgcgcaggatcaagagagcttcggcttctcgggggaggttcttttcatggcggtattctgatattagagggtctagctcccgcattttcgagatttttgatcaagaccttgcacaatatggtaaacagtacactgctggtaggttactgtcttcgttgggatggcctcctccgaggccaggatctgggcaagaagatttcatcagagcatgacctatatggcggtgtaggcagctaggaacagtcagaagaacatagccagtgatggaaattccagaatgaaaccaagtttggaacatccatggatgccctgcataacgtctggattcaccccccgggatattacgggggggagttnnnnnnnnnnnnnnnnnnnnnnnnnnnnnnnnnnnnnnnnnnnnnnnnnnnnnnnnnnnnnnnnnnnnnnnnnnnnnnnnnnnnnnnnnnnnnnnnnnnnnnnnnnnnnnnnnnnnnnnnnnnnnnnnnntgagatagcggggggtgaatttgatcacgtgacatggatatacatcagatggtgttttctcagtcatatactagtagtagacacaatcctgaatttaggaagtgcactatatctaggtaaaatttgagctggaggatacttggaatgtcattcctatcatttttgtagtctcttgtttgcagttggggccatctcgtatacagatatatattcacagtatgtcaaattgatacgatagctaagttctaaaaacccaacattccgatacatttcactatttccaagcaagaaaaaaataaaaatcagggagaaaaagtcataagaccttgagtagtcctgtatacttccggcggcttccccccctccaccgttttttannnnnnnnnnnnnnnnnnnnnnnnnnnnnnnnnnnnnnnnnnnnnnnnnnnnnnnnnnnnnnnnnnnnnnnnnnnnnnnnnnnnnnnnnnnnnnnnnnnnnnnnnnnnnnnnnnnnnnnnnnnnnnnnnnnnnnnnnnnnnnnnnnnnnnnnnnnnnnnnnnnnnnnnnnnnnnnnnnnnnnnnnnnnnnnnnnnnnnnnnnnnnnnnnnnnnnnnnnnnnnnnnnnnnnnnnnnnnnnnnnnnnnnnnnnnnnnnnnnnnnnnnnnnnnnnnnnnnnnnnnnnnnnnnnnnnnnnnnnnnnnnntcccgccgtcgactgttttatacaacccgctgctcatgtgacctttccgataacaccgcgagtgttatcagcatccatcttatcgaactttcgctcttctttttcattccaacttgttctcagataaacaagatgacgagcgacaacaagttcttttttgactacgtgagtatcatagaagaagacaaagaatgcttccggcgctgatacttccttacccagctctcgtctatctccaatgacgtaaggcggtattctctcgacgtcgcagactcgatcgaccgccaagtcgactatgccgcgcacgcgatcaaagatacggtggcccagcagtcatggataccagccactattcgtccgggtcgtgctcccccaagagtgcgatcgcaaggcatgacggaccgagtggaaagctggatgactcggaatcgcgcatggacggcggctatcctcgcatttatcgggaccggcgttgtcttatactatggaaacaaaaagttgcacggaaaacggagaaaggctaggagggcggccagcggcgcgaggaaagagattgttggtatgtgttgcctacattcgatctgcattaggatccgagtgctaattctgcgattatagtggttgccggatcgccgcacgaaccgatgacaagggctattgccatggatttggaacgtcgaggatatattgtatatgtgactgtgtcttccgcggatgaagagcatatcgtcaagtctgagaaccgtgtggacatcaaggctctctggttggaccttacaactgtaagtgctgtttgtgtatccttcattcgcgataaataaactaacattgtaactagacatcatcctcgccggccgaaatccatccttcgttgcaagagattcgctccttgatcagtcagccacagtcacccatcgccggagtgcccccgcacacctgccaactgagtggccttatcgtggtcccatcgaccaactatagtgcaggccctgtcgcaaccatcccgccgtcatcgtgggctgacacggtcaacacccgtctgctctcgcctattctcacagtgcaggcattcctccccttgctgaccctccgcagcaatagcagcactattgtctttgcctacccctccatatcatcctcgctttccgcgccgtttgccggacctgaagtcgccacaacccgagcaatctcaggcttcgcggcctcgcttcgtcaggaactccgtctcctcgaacaaggcaatgtggatgtcgtcgagctgcagctgggcaatattgacctaggacctacataccgacatggccagagtcagatagcaggcacagaagtccttgcgtggaatacccagcagcgagccctctatgcctcacagtatctgtccagcgttgagcaacgcccagttgcctctgctggtcccagcaccatacgcggatcaccggcgcggaaactccatcacgctattttggatgctttggagcccacctcgcgggatatcttcggccgtaaagtgaccaagaaatctgtcatgtatgtgggccggggagctcggtcatacggcctgattggggcctgggttcccagtggactcgtggcgctgatgatggggtaccgcagtgggaatgggattaaccccgagagcccgagtggcagcggcagtgaaaccagctgggagagagtctagacccgtgtacacatctcgcttcattggcactcccatctttaatatatcaaaagcacttgctttgaataatgcttttctatacataatatcatcggaaatactcttcgctcttaatgattctattatccctaccacatatcgacatatagcattaaacgccatagaaatttattagattagttgctacctagttggatatcattcatatgatgcagcgccatcctcactcctatcagaagaagaaaatcgacctgtcaaatccctctaaaccggcacaaccttcctctcattggacgactcaccaaaacacgcatcgctaaaagcctcgtgtgcgcacagcgggtcccgtgtcgcccgcttaatcccaccgcgcgtcaaacgacgacgcaaatgaatcagcgcccaggaaatgacgaagaaaaccaggaccgcagccaagacgccgaaacagtatcccgtcacaagattgctcttctgcccgtggtcaccgacgtcgaggaaggagtatgggtaccagccttcggtttcgtgcgtgatgtatgcgacgcagaggtagagcaggagtatgaggagtaggaacgggatcgcgatgaagggatgcggcgctgtggctgggaggatgatttccagtagggcgtagacggagttgaggacgtgttgggagatctggagatgtgggttagctaatgtgccttgtattcgattctttttttgctttgtctccacatctgcggagtagaagagtgttgcggggttggggtggggttggattgtgatatgagctctgttcatgtggcgggggatatgttggaatggaagtatagaggcaaaatcgaaagatatacgtacattttgccagcgggtgaatggctccttgtaccacggcgggctgaagaggatagcccaaaagacaaccgtaacgagaatcgggaaggttgtgactgtcacatacaatagactgtgtagcacgcggaagacccgcggccagcggtcgaggagaaccgaatgacccgttcgtacatagtaggctgtatggatggcggcgaatagcatgtagaagccagtgccccagtaagtcagccaagtgaagtagctgaaggagtgaccaatcgaggcggggtcatcgtgggtgccataccagccccagaagatgaagatggaggcgaaaatgtacagcgagatcagaccgcgaagaccagcgaggacggcggggggtaagatccaagatgtctcgaagtggtgtttgacatcggtagtccggtcaactccgaagagagttgccaatgagcgtcgaggcatgttgttgcgcgtcttgcgatttcgttgtgccctgggaggattgaggctaaagaagtaaacaaggaaaagcaagattcagctgtacatgtaggtaggcactgttgagattggaactggggtaattaatgcttgctttttcccgcgatacagggcgacctcgcaagccgttttgcgctttaaggcgtccgttcacgaggactagagccagtcgtgcaggtactatgctcccggtctcacctctgtccccacaagcgctggccatacatagcgaaatgaccttgaaggcttgtgattgaatccaacattgaatcagaatcaggggtgagtcttataatggatgaagacatccgagactttgtctctcggaaatatagcattaggttagatacagcagtactttatgctatactactgcttatagtctcatgctaggtacagactgaagtatagtaaaacaaagtctacgtctagtcaggtctacaggccaaatatatgcgaaacaaattggtatattcacgcagtaagatcctaagtcgtgaaaataatatttctttcactcacactaggatcaagcgggtgccgcacaatggatctgaagtctagctctagcggagcattctgaacagttcctgaggtaataacgccatcaaatggcttcagcgacatttgaatgcagagggaagcggctgcgtgtctatccagccaatctgctctgaatcagatggccagacatcagaaaaaacctcgaagaacatgtctcgacgacttcttggaacttgttcaccagccgcgatctgggtcataatgaagaccctctagttgtctcccttgaacatccgtctcctgcaagataaacacaaactctctagaagttgaattacccgcttggcatcgataatttgtggattccaggaaagtcgtcctgaatgagagcttcgattgtctcagatctgaaatagaacatccgctcttagggcggctatctcatgatatttgagattgagttgaccgaaagatgtgaggcccgcgcgtgaacctaacctagcctgaagctaaaggtttagtatcttataagaaaatgatgtgtgacgtgacatagtctgaggtatagttggcggctatctcatgatatttgagattgatgtgaccgaaagataggaggatcgcgcgtgaatcagccaccagcctgaagctaaagggttagtatcttataaggagataactagtgtgtgatatgacatactctgagacatagttagcggctatctcataatatttgagattgagccaaccaagatatgggaggcccgcgcgtgaatccaacccagcctgaagctaaatgtttagtatcttgtaaggagatagtgtatgatgtacatactctgaagttggggacctccggtagaagttaatccatttgttcgttacttgaattcatcaaatcttttgtgtgatggtgtgtgcgacgatgtaagcgattggaaacatccagggagagagagtccaaataaatacatctatagttgttcagtttgtcgtttgcttacaatatcttactagctctgtattgggtggtatgtgtatctaatcatcacgggtttcaatacggtaggtgcttccaggcttctatagagctgatcttatgcagtcttgcttaaggttgttatcagctctattctgtgcaatagacggtatcactaggcaataattatacagttatgtatttttcaaaatgatgtctcatattatttacttacctgtaatatccataattaactggcgcagtggttaatgagccaaagtctgatagagatcctatacgctttatcgactattcggagacaaagtagaaaaacaaataagccaagtaaatctatagcaaaattatttaagaactagaagaagagaagcaaggagggcctatttgtcacttctcccatgcctcggccatgatccatcaaggttggcacttcgtatacaaggtttaggccacccgtggacccgggggtgttgctgagtaacctgcaacattatgcctaattggggatagtgcaaaccacggaccatggttgagttaactcgcagaggccgcgtatataatttctatggcgacatctgaggttgtaatatagcaattgcactatcaaaatagaaaagaagccattatacaacggccggaggaggaatcccttgaggttatatatccccatcccattcggaaccatttgaaacccttttagtagtgtggtacccgctctcgtggcttgcaatctaagtaggggatggtctcacttctctcaaccattggtaaagctcgcccgtcttgatttttatatatgactaggcaccagtttcttccatgtcataatcgagagcaggcatcactcatgtgaggtggtttcttcagatcagcatatgatgaaaccacccgtgtggggagagacggcagagcaactaggattctagaagatagcgggtcaacaaagcactcagtcctagggagtaggagaataattagggaaatcaatagtaggcttccaagagtatatgctctaatagaagaatccatagccaataacaatacataatatgcgtctgaatgttattcttggcgaccctcccccctgaataagtgtcccccctgagacgatcccttgtcaaacgtcgagacacagtggagtgcgactgttttattttagtgcacggggcgcgtctatttactacttgtcatcctaccctcccaaggtttggcaattgtgatcgtccgcccttcatttttctcctttctcctttctcccctctctatacctctcccccaatgccctgatctttcatttggcttcgattctgtctgtagggctgtcattcctttggctctattctatcgcctcccccgcccgaaccccctttgtgtgttatccgcaaccccgacctttcttcagacactcttctagactacttcgatgcttccggcgcaaatctcgaatccaaccgaatcgggatacatgattcactagccgactattagatattcatatacccatcatggatatgcgaggaaaactgggcgaatatcgctccaactcccacgataataccctgcggagtggctccccacgggtggcgcattttgacggcgaagttcctcccgcactttcccccctcgacgcattcgccgctcagagtcgatttctcgcccgacaactcgatgagtctcgacggggagaccgccgtatgagtcggctgccaccggcgagtgtagctcgatcgctttcgcaaggccggccgggcttctaccgctccaagtcgtcggttgatccccgcacccgcaccgaactgacccggaaacctacgcagaagggactcccagagtatgaagagcccaagcaccgccctatatccgaacatcctcgattcagctccatctccaatgctaccaccgaggctagcttttacgaggataatgataatgtgacgccgcggacagcgacgcctaatattagtggggaagcgcatgaaataccgcgcaccgagtcaccagaggatttcacgtcacgtccgagtggagcggagggtgcgcccgttgttgtggcggttgcggatccgcaaggttcatcgatcgactcatcaacttcgcgactgcacatcccacgtaccttggcaccaccagtgtcaccgcggacgcgtccatccagcagtgccaaggttacacaccatgagagttctgatgatgaatatagcagctccaatggtgggtcgacgttctccaaacctcgcaagctgtccgatggaagtgctgtgtcattgccgtattctcccatgtcgacattccctgcacgaccacaccctcgatcgccgtccttgagctcggaaacatcaggaacgggaacgaaccacctaccccgcccttcttttaatttctctcgaccgctgagtcgatcaagtacgaccttgtctgctcctggatcttcgacgcctactgaaccgatccttgcctcggaatcgaaccatatgacccgtcgcggcaagccgactccgcttctcttgcagctctcgaccgaagatgctgctgcagtggaagccatggacggcgagccgtcgtccgccatgtcgtcttatatgtacaccaagtatgcgcttccgcgcggacgcttcctttcacgggattccgtggtctttgcaggcttgcaaacacctcatttcgagtgggaagagcccatatttgagaaaacgcctccccggcattcggaggagccaatacgtttggcacggacgccatcccctacgccccctcgccaattagagcactcgcccaagcctcactcgatgcacgaagtcccagcttccaagcctcaatctccacctcaatccccgcctcaccctcagcgccagccccaacctcaacttcaacctcagactctcaagtctcggcctgttcccgactcaccagtggagccggtattacggccctctgctgagagcacccgaccaacgaacaatgacagggatgaaactgtctcttctgcggattcggctagcacagtgcgaccccaagcccccaccgcccaggtctcggcttccggccttacagccgacgagcacgtggccaagggtattgaatgccacgagcgaggatctctgagtgagtcgacgtatcatctgcggattgccgcgaagcaggaccatccgacgggaatgctgctttatgcgctagcctgtcgacacggctggggcatgcgatccaatgagaaggagggggtacgatggttacgcaaagctgtggattctgtcggattggatatgttggccgatccggacgctcccggtgcatccaaggcgaaggaattgcaaaaggctaaccgggttcaatttgctctgagcatatatgaactaggcgtcagctacttgaatggttggggtatcaagcaggacaaggcttatgctctgcgctgcttcgagatcgctggtcaatggggtgacgttgatgctatggccgaagctggattctgctacgcggagggtgttggctgtaaaaaggatatgaagaaggcggcacgcttttaccgccaggctgagtccaagggtatgagcatggttggaaacagctggtacgttcttcctgatatttacatcccgatcgacgtcattaacaagtataaaggatctacaaggacaaatacaacgaggagtccaatggacgcgcccccagtggacgctcccgtggccgaaatgccagcggagagaaggacaataagccacgcagcaagtcccgcactcgcagtatcttccaacgcaagaagtccaacatatcagaggcatagactgtcttttgttctattcacattccttttatctcgacgcgttctggagttatcgaagtaccatccattttgcattttgcattatgtttggagcgttctgagctgatctttgatttttttgctttttatagtcgattcttcgacttacattccttcactttctcatgttcaaacttttccttttcttttcacatttgcattttcatcctttcttagccgcctgggcagctgttatcgagcatggaccgagtctggtccacatgtctcgcaggcttaatacttcacttctccgtgtataccctttttcgtttcctcccatcatttgccatttttgtctctctattttcatggcaccttctcttaccaattctcttcttggtcatatttcttgggtatgaccccctggacaattttgtttgtcatatttgttctcttattttgctgaatgcctcagtgtggcgactcatgaactcatgacagaatcaagacagcgttgatctgtatcttttggacttcctaggagcatttacttgatcttctccaatttttcagtatataaagcaagtaacagggtctcagcacctgaccccccgcattgttccccggcttttgtctcggagcattgactcaaaagtgtctagatcggcctcttctccgggctttgacaccctaaaacacactggcgtccttggggttatgtttagcgcggattattgtggattagcgggggttctgactggactagatcggcttttctctccgtctaaacctgtgaatacggggggcacactccttgcatccagggtcgcctcccttggcagcacgctatgttgctgctagtgtcgccgtccaccaatgagggtcttgctcattcaataatctagtgtaacggtactctagatgagtatttctgaaaagtcttaatctcccacgacacttaggaaacgccccggtaggacagagcacgcgtcctggaattgctcttggtattttagtccacctcggctcttgtctttcatgtggtgatgattagacactcgtaacctgatcctaaacatcttgatcgcgtcttcccggaaatctggagttccccgctaaagtgccacctgaacttctcttctcctctccatatacaattggagaaattacaaaacagggcaaaataaaagaaaaccagaagaagactctatcttactgacatgcatcatatttcccctttctttttcgaattgcatttggtggctttttccaggtctataacatgtgacgctagaatataccctgttagttcttcattttaggtctcagtcttttattataaagtacggaatactacccacgctctttcaggggtgcttgtatcactctcattggttttcattcttttttccccctcgcttcgaagctcttctctctttttataggtgtttgttcgactcgactcggtttgtacatgtcttgcgtagactcttacagttacaatccctaatacaaaaatcacagtaacaagatgtcgactacaaagccctcgttcgtcgagcaggaagccagcgtaaccccgacgccaacgaagaagagcttcggcgcgcgcctcgtcgcccatttcaagaaatggtggtgggtgcacctgattatattcatcgcttgtttcctgattatcctactaccggtgtaagtccactcttcctgacattcttaaccggcatgacggcccggacaagaaacatcccactcacatactactgcaccgtctagcgtctacgtcgcctaccccaagatcgcacaagacgccgtcaacgactcgaccctcgccatcacagagatgatcctcagcgacccaacacccgactccttctacctggagcagagacaagtcctcggctcgaaaagctcctaccatccccagatctacgctttcaattcgtcggtctcgctggccggtgcggcggctccgtttgcttatgttactgtccccgctgtgcagtcgaaggacggagcggaaatccacttcgagcagagggttgatctgacggataccgatgcgttcgcggattatactactgccgttatgttgaatgaggaggtttcgttgaatatctatggaaggccggggttgaagcagggtggtttgcctaagacgacggttgattataacaagactgttgttatgaagggtatgttattgttcctggtttcgtgaatctaggagaagaagagaagagtatggttactaactcgatgaaacaggtttgaacaaactcaagggcttcaatgtggccgagttcttcatcatgttcccaccagtgaacggatacgggatgaacggcaccgtgatcatccccaatgcctcggtcatgaccattccaatggtaattactcctctttccatgcatcacattctacgacactaacccaaagtagggcaacgtaaccctagacctccagctagacggaaaatcagtgggaacaacctacctaaacaacctcgtcctcaaaccaggcaacaacagcgtgccgatgctcggcaaggtcgatcaaggcgccatcatcaccctgctcacatcaaagtcgaatccctacaaagacggcatcctgcccttcgacatcaccggaaatgagacatcgtataacggcaaggacctgccgtacttcaccaaggcgctggctgcgaatactctgtcgattaagttggatgttctgagtgcgctgaaggcggcgggcattaatcttacgctgtgatgtatactatttctgttaatgctcatggtttatgtcctacgttctactttctatattgcactaccgtgaccgttaacagattcggtggttggtctgtgctgtttggaggtttgttcacgtttgtgtatatttaataccctttttttgttatcagtatctgggttgttacttaataagatgtccagagtgagggatatagtgcttgaaattttttggatcacccgacgactcatcaaggattagccgacgtaaattgactgactgttctttcagtaacgaaatatcccgctctagcttgttcagtataaaaagacccatcgtatttccaattctcgacttcgagtaatcaagggtgtctctgtgaaacagaatgaagtaatctagtagccaacaaaagaataagaatgaccaggaagaaaagaaacggaagccgcatgactctccagtcaccctggtctcctatcagttgacatgtgcggttgtctgattagtcggaaatagaacatatcctacaaaccagcctgcagaaactgctagatatctgtcccccatcccctcgagggattttgggacactgcacgtgatagagtttgcatgaaggctccgtttgggtaatgggaagctgagattttctgcaaccccggaaatgggataattataaccacttctgtggttcagcggtcatcaagagagggacggcgttgcccatactgcgggctattatcctgtgtacaatcccgaaaggaattgtggaggtaaacctactatttgaaatgcaatagacaagaaaaatagtgctcagcttgcccaattcaatggaattcctagcaagacagccaactagaatagccatgaaaacttgaatgttaaagttgcagaaagtccaatcctctgatagatctcagaaactagactttccaaatcttgaataaatcaggtgcacatatttattatgcttggctttcttgctaagtttccttttgcacgagctggtcactattatccttgtgttttgcttttcgaatggtagttttacctccaacctccctttcgggccagggctgtatcaggtatagcccgagggtatggtatagtgaagtgttgttcaaggtgggaggtcgacgactgttttcttttagaatcctgtattgtgctgtcggtcctctatcagttagcatccatctgtccaccggtgtagtttaattgatatagcttgccaaggtggtggcagtagtagatgattgtcatccttgaattccagcagggacagctcgctgtggcttcaagtggaagttgggaagccaggtttggaagtggaagttatcatggccaatgcaagagtgggaaagacaatgtgagagatgaagaagtaaaatccagagagatggtatttatatggcaagggcaggaaaccaggcaaccatgggattgtcttacatggggtttttcttccacgtgagcaacctgaaacagaggtaagtcaggggatatgtagttgtccgtggaaatataggtatttcatggcagcctgcatattcaagactgtctctcatagttctacctgaagacggtaagccgcagtactcgaatctgtttctcgacactatatacgagtgatctcgccggcgcgactgttctaacttctaatgctgcacagagcccctcttactggcttattggcttcacagcgacccctcggccagatcaactcccctgcttttgtcagaattcagccccttaggagaaacttggccacgtgattttacctggtcacatgatgtttcattaaaacgctatttttttcaccgctaggggagaattggccacgtgacacgcacgtatgtacgaccttgtgatttatagttgcttcgcttcgctccgcaactatacgccctggatgcagtaccagcatgggttaacctttggagacaagccacaggaggcatattatagtattgcatgtcagagcttgatagtgtctaaaatcattatctcttcatgaggcgtttcgtaagagacagttgacctttcaacaaagaattaaagaatatacacagagagtgagagcttcagattgtattactgggcaagaactagatagcttcaccactttcctatcaaaatatgggtggtataatccctaaagggaaaggaaaaccacataatattgtaagatactcgtataatgcaccctgatccgagactagtccagggtcaccatcttgattaagacaacgggcagctgccgaattatgccgactgactggtgtacctacctggagtcctcaagattgggtggtcgttgatgataaaaccgatggacatgatcaggggtcccacagatgggataagccctcacattataatatgaccactctcaccaccagttgaagcatatgctagatacccctgtattatgctaactgtgcattacattcctagtattgtatcattcctgataatctattccaacgcccttcacccacgaaagattgagctaacaagaacctcaacaaatgccaccacaaatttctgtccgtgctcctgaacctattgagacccccaggtaccccggccatttccaacaagaatccatacttcttgacaacaggaatatcacgtcattatcttcaaattacggtcgcactacttttgggtatgggtacaatcagcgcgattttgtatacgaaccgatatgaatgttcaatgaaactcgtgaattgatttgaggtatgagatcgaatctagttaaattgatcacttcactggactgtttcagagagtgcacctgcaagctgccgtagaccaacactgacatcgccgggctgaatgcagcactccaagagggctagtttccatggctccaaattgatccgatctaaggctgatagcagatcggcttgtgttttgatttgcatcgagaaaaatgccggattaagaccccggtctttgtccaattgagatgcgaacgggtcgttgcatgttcttgtatgcttgggtgtacacatggcggaagcgaatttggcatagttccaattggcgatgtaattatacggtccatcatgaattgcagactagaatatggcaaggaggatggaaaaatattagcaaaggagtcttgcttaattcaaagatggagaggaaaaaagagggaccttgaagcaggatatgtggccttagaatgaacagtaagaacttacctcgatctgataacccagattgttgaagatgaagactatcatgttggctctacttcggatggcagtacttagctcttgagcagtcatactaactactatcattgaaaggtgactcaaatctgaccctgcttgatcagcttttgaaaaacccaagcctacaccttattgggtgctgtaatgagttgaatgctggctacgctgcagatgggtacgcgcgaagttcccctaccaaagttgcggttgtgatagtcaccttcacggttgggagcctatcactgcttaatgcaattgcaggagcctattctgagcgacttaagatcataattatctcaggctgtccaagctcaaaattgctgacagaggggagtctcctccatcatacgacaggtggagcgagcaaggaccaagcactgcgtgtattccaagagttcacggctacctcaatccgtctggattccagtgaatatgctgcactccgcctagatgaagctctctctcagtgcattcataaatcactgccagtctacattgagattcccaccgatatagtgggggttgtgggcaatgcagcaactcctttgcagatttcaccgccaacattaattcaatcagaggccgtcgatgaaattatatccccactgattgccacctggaatgcagcgcaccggccgattttgatcattggtgctctggcacgcttcttcctctcgacagaagctctgatagcatttgctgaaaagctgggttgcgccgtcttctgccagccggatgccaaatcaacgctaccagagtcacaccctcagtttgtgggcacattttgggccattgcttccaagcccgaatgtagagatattgtgatggacgctgacctctgggtggtagttggaggccgttggtctgatttgcacacggtgggaggtctcaatatcaaagaggagcgccgacgtatgattaatatccaggaaacatctatacgaatgccgtatggtcgattgtttcaagatttatgcctagccaatgttcttggcgcttttctgcggtcctcaattctccccaaaagagaaacacttctttcatcccaatggaagtcgcgtgaacagaccagagtcaacagtcctgtacttggcgaagctctcacagtgcgtgggatcgtggatgttatccaacagctaattacaagcaaagacaccttgatagctgatacgggggatgcttggttcaatgccgccgatatttcgctccccatgggggcgaactttcaaattcagctagtttatgcgtctctgggatggagcctacctgctgcgcttggctgccaactagctcgccccgatgggcgaacaatcctcatgattggtgatggcgcttttcaaatggaatcttggcgcaagtacctgggacggcaaagaagtccttaactcccagctcttccattctatgggccaagagggtgccgatattatggtctttgggtgaaaagctcggggtgatcaatggtggcatcaagctcggtcggtcaaatagctcagtcatacccgcactttcaggcatcctcaaaactattcgacctttgatacttgctgaagagaagtttacgttccatggtcagcctggagcgcgtaaagaatttagtcaattaagatgagagtaaggcctcacttacctttctccatcatatcatagacttggggtaattgctcaagttccatgatctggcattgcatggcgaggtttttacgaaggaagaattccagtgcctcctcggtatcctctctggtgccaacataagatcccttgatagtgatcatgcggatgacgaccgagaagaggtcggcttttatgactgcccctggcggcaagccaactaacacaattgttccccgagatctgatgtactgcaaaattcagtttagctaaatcacttttccggacgacttattgcgtggatgctgttaggaaaaagaggggagttaatgtatcatctcacctcaacagcctgggagatgggacgatcatctgatgataccactaccacagcatgaggccctccgttggtaagcctctgaatatcacgggtgagatccttggagcttttatagtccgcaaaatagtccacgcccaatttctcacaatgcgttctcttctcagctccacttgatattgcaagtactcgaaaacccatcgccttcgcatattgacaagctagggtcccgagccccccaccagcaccagcaatggctaatatagcccatcagcagtgaacgtggatagttataacgaataaaatcacgacgaaatatacgaaatcataccaactatatcacccgcctgggcgccggtctcttgaagagcgcgatagacagttaccccagcgcaaagaatctatattcaggcgattagaaacacgccatatttgtttgagctggataatgaggtaaaagaaactagaccacttacgggagcaatcttgtctaaaggcgcttctggaggaattcgaacggcacagagttccttacagacgacgtattgctgaaaggtgccgtctctggtgtacccagaaaactgagcacttgcacacgacctctgatcattggaatcacaggatacacaagaaccacagatactgttgatccactttatgtcaagtgggctcatttagtatacttgaaagagtggaaaaataagcaacagggacaagcattcttctctcacctgtattccaacgtggtcacccacagctaaatcttcaactccctctcctgtcttaacaacaatccccacgccctcatgacctcctttagaatgtcagtatggcccttttgacacttaaaaactggataacgctgatcaagggcattgagagatcaggtgcttaccgataagacctttcttcggatcaagtggccagccccctttccacgcttgcaaatccgagtgacacactcccgagtatttgatattgacgagcacctcggtagcgccgggcacgggaacaggtacttgggtaaagtgcaatgctataaatattaaacaacgaacgtaagttggaagaatggggctttgaaaaggagtaaatttattacctgaaccactggtctcaaagacctgagcccattgcctctttggaatgtcagtcattcttcctgctttcaactcgaattatactgtatctgtcgaacggctagagaaacgaatattgagaatcgcaccaatttttgagtggaactgatggtataaggaaatggaatgttgtcattaaaataaaattggcttgagaagggccttcttataagttgagcaataagtatgaccatgaatcctgggatgcaaggtcgtgctatcactattggatcgaattgagtactccggtcttaccacccctcgtcctaccctcctccttgattattctgcattatataccaagactggaagtgattgtcttgatcgacaccgtttcagttcctttatttgtaatacaacttactcatttgcggcatttatgattcaactgtatacatgtgcaagatagaagtcttcaaaaacacctcattgaatgattcgttatcatcaagctagatgctatctctgagatcccaaagatgcacctgggcatcttacaatagaatttccgcagtaccaagtcagccaaaaggatcatactctacccttaatggtcttcttgaaaccgtttgatgttacaaagtaatatattagttggccgttctgctatctctatgggtttgcacatcttacctctctatcacaccaacgtgcgtgcctactttcggtaccacacgaatgcacatgtctagttccgagtttctggaggctgaccatctcctgcaatcgtccaacaacagcatagacaagagaattgaaccacacaatgatatcatttacacatctcaccttgccaccaaactaacgtgcgtgcctactttcggtaccacacgaatgcacgtgtcgagtctcgagtttctggaggcggaccatctcctgcataatgatatcaggtggtgtaatggctttcgtcgcacagatcattatcacggcttcacgttttgtctgccgatcaaatcaagatgcaagtcaatcatcaatcgtggatagctattagatgagtcatgtctattgaaagtaactccatattcacaagcgtaacatacaccaatgaggcttgaccgtacaccattataaaagtagcctagaatattccctcatatgtttggaaagtgaaccccatcatcccccctcgccgtatagactttacgttttgcatccagacttgaaggcggtatcagcacctttgcccagaatgtttcctcggtcactcaagcttctacgtgatgagagctccgtcaagtacaaacacgtacattgtacaactattacaaagaagactttgcatgaatcactcaaatcgccagttcaatcctcggggcttcatactgggatctcaaaaaccgtacacatagccaacttaccatcgaaaacgaccaaggttcttgaaatgaaacatcgagtggtgccagttcgtctttcggggtcttcgatatctaccaagtcaggtggacaactgaagtataccctcgatcgatctctgatgagtatgactggtggccagattgtgtgtgagatgcttcgaaggcaagaagttgattctatctgtaagttgatcctacgcaagggagaaggaatttgcttcctattttctatgcacatctcgatgatataggagctgactatatgaacaatgagcagttgggtatcccggcggggctattctgccagtctttgatgctctgcacagctgtcctcattttcgatttattcttccgcgacacgagcaaggggcaggccatatggcgcaaggatatgcccgcacatccaggaagccaggagttgttctgaccacttcggggccgggtgcgacgaacctcatcacgcctttacaagacgcgctaaaagatggcactccactggttgttctcaccggcgaagtcccaacctatgccatgggcacggatgcctttcaagaagcagatgtgattggcattacgggcccttgcacgaaatggaatacggtggtacgagacattcgggatcttgccacccagatcaatgatgcttttagaattgccatgagtggacgaccgggccctgttctagtggcactacccaaagacgtgaccagtgcggttcttgaaacccccgctagagtggcttcatcccaatgtctccctaaattgaataaccccgttttacgatttgatgctctcaaagccaaccgatcggcgagcatcaaaagaagcgcagatcttatcaacaaagccgagagacctgttctttacgcaggtaatggagtgctttcgtgtgccgagggcccgaaagtgttggcacaattagctgaaactgcctgcattccagttgccactagtcttcttggtattggatgttttgatgagaacgatccaaagtcacttcagatgctaggaatgcatggtactgcatatgcaaataaggcgatccaagcagctgatttggtgatcgctttgggcgcacgctttgatgatcgtgccatcggcgaccccgatcgttttgctcctgttgcaagagcggccggtaaagaccaacgaggcggcatcatacacttcgaaatccacccccctcatatcaacaaaatcattcaatgcaatgaattcgtccaaggagatgttaccgccggtctcactgagttacttcatcatgtccagaaggtggagagcagaccggagtggatgggccagatttctaaatggaagaagacattcccgatcaagccgacgcctccgaagcaaatgacacaaatatctcctgagtgtgttattaggcttctaagcgatcttactgaaaaattgagcaaacaaaccataattaccactggtgttgggtcccatcagatgtgggcggctcagtttttccgatggactgcgaatcgctcgctgatcacttctggaggtgcaggaaccatgggcttcgggcttcctgcagccattggcgcccaagtcgcacggcctgacgcaatggtcattgatattgatggggatgcatcgctgagcatgtcgatgcaggagatggccgtggccgcggagtttgggattaacatcaaaatcttggtactcaacaataatgagcaagctatggtcacacagtggcaggctcttgattatgacaagcgatactcccacgcacatcaacgaaatccagactttgtgaaggtggctgatggaatgggcatcaaagctcagcgattggatgctgtgtctgacatcacagataaacttgagtggcttattcgctcggaggggccagccttgctggaggtgaaggtggaggaaaaggtccccgtgcttccatgggttactcccggcaaggcattggatgagatgatcatcaatgccagccagattgacactagtaggaaataggttgaagatcattttgcgatagttcttgctgcgcgatttcttttcaaagcaatgaatagcataattttatttgatgtcgtatatcggagacatttaggctgatctttgccttattcatcggactatgtaaagcagatttgctgcacagacgagccgagccgaacggcacgaagtaaaatactacgtcggagatttggccggaagggagctaagaccgagatagaatctagaatcatcgacggagcacactcggctcacatacgaagcctttgtatggggccggaattggcaatgaaatgcagctcagattagtctcgcgcatatgtaaaatacgttgcgcaacattttaatatgccgttggagtagaaacctgcatatttaaaggcaagtatggtgtggacgaattagtacgacatctactattccatatatccttgtctaaaacagccttcattggtccagtaccagaggccttgccgtcgcagggaggtaatattagctcgatataatggttggtctcccacaaaacttgcatcctcaaaatcattggtagctggtatgggggtatgtataaggatgtgaaatacttcagcagtcggacctcggaccacaaaagtctccgaccacacccacgttttttttttgcgaataattacattttggaaccgtattttttcctacgctgatcccctctgactcatagccaggtgagacctctggcaaggtttcaatggttggtaacggccagaccgtagcgtcgcttgggtccactcccaccaccaaggccagggcaaaccacaccctctcgctaagtggtgcagctgtcgtcccgtctgccgtttagtgtacaacggccacggcccagagacctcggagcgtctcacctatctccggggtcaggttttcggtcaggtccagctaggtcttttaagattgcttagtacttagctaaatccacatttcagtatactatcgactaagaacctctttgctcaagataagaactaaattcggatcggctgcccctctagtctatctgaaaatgattgtgctttggttattcaaataattcaaaacgatcccctcatcctctataaagaaattcgcgaataaagtggccctccgccccaattccgtattgttgatatgccctaccttgctttccggagtacagttcgtcagcgaacacgcgccagtagtcataacccaaattttcatcgaatggtttgaataggtttggcaattccattaagtcgacgcttttctgaggtacacagtaaaccaggtacgttgagattttgtcgacacaatcatgatcttattgattgattctgttgactaaaggctcatctcgagaaagctcagatgctagtcgtttgacgcgtatcatttttgtgttaatcgagatgtagccaccaaaaatcaaaaggtgccactctccagtgctgcgaagaaccctttgtagagaccaaggtctggaatcacattgaaacaagacgtgagaattgggcagtctggtaccaacagccaatttttccagctagctcaatcttgctataggggtagttcaatttgacgtacttccctttcagatgttctcatttcaacagtcactcgaacaggatactctcacccctcgcatatagtcaaatcgactggatgtgagttccactttcgatactgtccgcatgcccacgctgagttctgcatggcaattttatcaatgatcattgcctttattcccgtttgtgccatccatgtaccggccatgagcctaaggtggatagtcagtggggttttgtttcatgaacgacgaacatatcctgcaggaccagcgccgacaatgagaacatcggtgctcagtgagttatgtgtcatattgagattggacttgaaattcaccaagtcaggttgacttgggtactgcaatcgtgttccaagtaactaggggtttccaaggttccatgataggatgccgaagtggccatgtgatccatggatagttagttaactataaaagcactcccggggcataaatagcaacgcagacacctttccacgtttcgtctcagtagtcaccccatggtgttatcctgtctagcatcctactactcctagtgaaaactctgctctcacacccgtttcgcaggcagggctcccgtggcagggtcccctcttcaatatgttgtattattctacgtacagcagccgggttatagtagctacataggtcacgtaggcggtacgcccacctgagggtaacaggaatatggcagttatgatacaatgtaccgatttcttaaagctattagaaaaagttccgtctttagaaagggctatttttcgttcaatgtggaattaaaggctagatcaaaagcgatcaaagctgacacatcaagtgacacagcaagataaatttccttgccaacctataaattacaccaaaaccccttgtgagaggaaagggaggggggggcttagatcgaggctcagaagctgacggccgtatagctaatttggccgatttgccgctgaagaagtgggacccgcaatggccttctagatgttagcccttgacgtaccttatccgataatccatcctgaattgtggaaatatcttcgctaatctcgtcaataaaaaaatacagagccagagagaaacgccgagactggtacttcggcccgagccctagtgatgcgaccatacactgaatgacacgtgttagtttagttattcgacatatgcatgttaccctcgcgtgggtgcactatgggtgcacgtcactatagagtagctactttaccccgctgctgtccatagaataatccatatctatctttccctgagctaccagtgtgccaatgcacgtcacgagtcgcctacacaaaggccacacaatcgagaacacgtcgcgaacttccctgcacttgcatacatgaatcgcatcattgtttcttcccctcaccatgagacctatcttattggcttcgaggctaaagtacgcaaagcgaacgcctttgggtgatactcacgaatatataagccctgtcttctctgacacaaattggaggccgatcggtttttggaaccttccaggcaccctcaagccagtatctcaaagccatcttttattatgtcttcgatcgattcctcacctttggtcaatagtggcagcctaagaggttttgtcaaatatatgggtatactggcgtcaagctctgaagctcagtttgcatccgccgtgcttggcgagatcacccaacagcgtgagcggaaccattttcaagaagaagagctgaaaaaacttcgaaaggaaattctcgagatcaacgaaacaaaaagaaccacgatcgcggatatgtttattgccaacgagaacgaaaaggcaaaacagagagactccgcgacgcaaatcgagtctcttcgcgctactatcgacgcaaaggaaaagaatattgccgcgttttctaaggatctcggggcctctaagcagaaaatagcaaagttggaattgaatctctcgcaggagctcactaaaggcacaaaatctgccgacgaaatcaatgtactgcgagaaagtttgaaagagaaggataggacgatagaccaaatgaggactgctggatcgaaattgaaatcaatgctatcagcggaagagaaaaagaccaaagacctggaaggtgctaatacctcgatggatacagagctgcaggcagtgaaggctcatatccagaggctggaagagtttcctatccagccttcggctattcttgaggatttcgtgtaagtcgtgcgatgaatgacacaactatttgtattaaccgttcctgtatcattgacagagtcacgaaatttacaagcctgtggacttctgctaaaagcgggttattcccattgctagagcaggatgttccagaagatactttgaaggttcgtcctcggccatcttttctcacgctcgttactgataggatcaaaaggagaagtctatctgggagaaacttaggaaggcggacaggatactcctaccaccaagctttcctcttataccttcaaattctttggctgctaaagctgtacgatctgcgttgatcctggctgttctattcagagagatcgatcgacgtatattcaaaccgagctattttctctcagggagaaacagtcttcatgaggctctcagtcatctagcagagaataatggcgagaaagaagctttttgccgtcgcatacttctctctattgacccgcacgctgaatacgtggccctgaaagctgagattcaagccgtggtccagacaatgtcttcgtttgtggaaggcctattccctgaagcgcaacacgaattgtttcgtacaaaaaccaaatccatagttcaggacgcggccgaattttggcttccaattcagcgatcgcaacagaaattcgagatagatttcgaaccgtctgatctcgacgacaatgaatgggatcgctttcctctcgctggtgaaaatacaaaaccggtggcacaagacattcatggcttttatcttctcaatgtcttcccgtgtatctccttggtagaagacggcgaccatgatccattgaccaaggtcattcaactccgtgattcccaggaattatacttggcagcgcagaatgaagctactcaagtagcaacctctgctattaccaggaggccccgccccaggaggcaatcaactgcaggctcaaataggaggccttttttaggtgggaattcaaccaaaggctgactgataatctgtggagaagggtttggaaatgctgattgctctggagactgaaggagagtataatggagatgagatgaccatctgaggactatcaacaatagtactctatatgaacatttttgggtcatactcttcttatagtttatatttccctgtatgaaataatgtcttaagcctccagccatatctttgcataatgacctcgcacttgccaatcgaatcgttccttcctgaaccgtaagcgaggtcggggcttgcatggtttgtggcgagggagagcacaaaacccagtcgaggagatcgtagattgttttctttttcttttccttctctgtacttagaattcagaattgactatactcttttcttctggaaagaactggcatgtaacacctggaatgaagattcgatcgcaccagctggtgagatttccattagtctacgcagaagcgttcagggttcgaatcggcttttaggaagtattttgatgcataaactttttaattagcaccgctcgttataccatatatacaggaatgaatggtatttttattaaataaagctttcagcaccataaaaattcatgcatttcaatttgtggaggtggttggcaagctctctctttagccctgtatgaactatgggtactttatacttctgatgactagtatttaactataagtatcctgggcacttccctacttgcttctttccttccttcctacttccatcttttctcttccacccatcaccatcatcaccatcatctcctttcttccatcactttcattgtcgcttcacattatggcatcaggacttcctacacacgagctacttctcatctcgccaaaaacgagtccgatagattcctcgcctcgtaaacggaggacgaccccgtctcccgagtccatcctgcccaaaaacgttgtgttgttctctccccaaaattcccatctacagcccctggtagctccgcccgggtatgattttcaagtcattgttaagtgataccgactatttcagacatgcaaagctaatttcatatagatttcaaacctcccccatcctcttcaaccaatcttcaccggcatccctcactacatagtcatcccgatcctgcagcagaaccgtgtttaccttcctcgcgtgaaatcatttttcgtttcgacctgcgccaatcttcgtggatgttttccgaatctcatatcctcaagcttctgatagatctttttccaactacacaggcggttgagtttgatgacaggattctgatctttcgcgtcgaagtactgccaccgaagccctggccaaagcgaattgcaggtgttccgtgttatctgacggacaatccgaacgataagggcccagccattcccttccgctatcgaactcgttcgaatatccaaatctcacaggaccttgatcttcgaaataagaatgactcactgaacctcatatccgatctagtacgccagttctttgaacaagctcgaatcccaatcactgagattcaggtgtggggccatatcgtcgtcattgttctcgaagatcgaattgaccacgatgaaaatgctatggataaaattttgcggtctgttccccgttctgttgcccgttgcaccttcttgtacctttcagagcatcacatggatcgcccccgcacgctgcctgctcaacgacttcaaaccgcctctccatcgcgatctgacggctcccagtacgatatactgagaccaggggtgatggtcagctccggtataaatctcaaaggagagtcaatgcgttcgtcctccggtgtcctagtcaaaaataatctgggccagaaattcatgactgttgctgcgcacgggttccctgccgatgcaaccgtttaccatcctcatgccggtggcagaacaatcggcagacttattatggaactcacgcatacggacgttgccttagttaatctcgaagatggggtggagtttgtaaatgaaccattcgagaacaccctaacgccagcgacttcattccgactccgagatttcattcggattgcagagactcagcagcatgatctggtatacttcgatagtcctttctccggtcttgctgaaggcgagcgaatgtctagaaacaccatgcgggttccatccgacgacccccaagagccccagcagatatggtttacgacacaatggagctatatgggacaagattcggctgctgatatggttgacggtgtttgtggttctgcaatttggaacgatgaccatagagttctcggctttttccgttatgccccggttgaaggtttatacaaagattattgcctgagtgttgctgcagatcatctgatcgacggaggatacagtgtggtctagccccgtcctttctttcagttatttgctttctctattcgaaaagtgatcgatggagcctgggatattcttactgtttgctgcggaatttgcttagtggaggcttgcatttttttaattttccagttcataatttgcccttagggaaggaatacaacttacccgcagagatctacccttgctcggtaccccgttgagaacggaagggtttggaactcatcactttgtctctcacttatctcctacttatcaatcacctcatcttcactgttgtgatcctgctcctctaaattggtgaccgaaaccccaacgaagctcgaagaagtttataacactatattctttgcgaggtggtggtcacctgaccactctgacaggtggcggaaggcaccaagcccctcggactagatcgtggtcgtttcgcctagtagaaatacaactctctccctctttcttccgcgccacacatagtagcccctcaacatatatcaataagccttgatacccttccctaaatgtcggtgcccttgctgtccccgttgcaggtcccctgttcactagaaaaaaaacgatctttctgccgcgattctactcaccttacataactatttcctaatacgaagaaaatcgtatttcaaagccctaaagccgtggccggtaactattgccagactctaaccatatttcataacgggcccgaatgataagggtctcatgactagcttacagccgctgtcgcttcctcgtagatcgatcttccaagaaagtccactcctcagacggcaacatgtgcttcgcctggcggcttatatttcggtccagcaagcacgacaatctgtctccttccaataccccatatatttcaatacgcacagtcttgcaaattccatcatctatcttagcataaaaaagtaggaaattttgagctgtggggtaacactctaacatccctctgtattcaatgaggattgcgatacggggcggcgtcgtaggtattatgtcttggttggtagtatctatcaatctgttcacttagctacaaacattgacagtgacttagggtagaaatatacccttatagagaaagaaaggccatgatgtctaggtatattcgtctggcggttcctccgggagaaagatatcaagttatagaaccacaaggtgaaggataagagtactgtttactccgtactgccctattaacgcattgtctccaactcattgtccctcaccaactcgttatcccccgataacgaacccctaaccgttgtagagaacgagagtcaaaattctgttattttggtaagatcttgttttcctttgaagttcgacatggtagtatctaattcttatctgagatttgaaggcgtagcttatcccatttacttgtgtatatgtttgagggagggcttgttgactacggtatcacgatggtgatacatactacaaaatcaatcagaactagagttccgaggttgaaaaagcaacagagtcgacagccgtcatgagagttttccagttttgttgtttatgttgtagggtttctcgttgggcagccatgcctacggagaaaggatcatccgttcctgccaatttctcaacctctgtaagtcatgtgatctcattgcgcaattaaacaccgaataactacacatagtgtcagaaatggcattgatcattccaagaagatgatatgggaggacaggtctcggtgacgggaagcctatacatggtagaagccaccctggagatagtcaagaatgagcctttctagaatcagcttgtgccctgtcatcgaggactcccgaatgatagatggattagcgctaggtcattggcaagctctctctctctcaatttgattatcaaggcacaaaataaggcatctaggcatcaacaccttcctaaagagggtttcgaatcatgaacgctatgtctacgtatcccggggagggtcacagagaattagggcccactactccgtactctgtaaagaaaccgaccaaagaaccaaacatctgagtcaaaaagtcggtctagacttttggaaatgagtcattgccaaaagcacaactctcagtactctgtacatcaagaactggttatgaaaacgagatgaagtcgaggtcgccatgtaaaggatactggcacctcccgtcttagaccaattattaaggacattgaaaccaacgtggcaccaaaagtgtcaacctaaaaggctctctagcataaggtgccaaggttgacatgccaataaccccacctctgtgtttcgcctgcatccacatttcggcattctcggagatcctggctctatcaggtcggtctccgagattggcgaccctagaccttcttttcgggatggaaatcagtcaactatcatgattccatagcaacacgagaggcttccgtagactcggaagctgtgtatctaggaacaagcgagattaggagccttttgatataactttgtatgtagacgtaatatacaagttgtacatcgtaaccttggaaaccataaaaccttctaagaggtggaccgagcttttaagatgtggagaagagattggcggcgcactgtgattggatcagactggctgactcagcttggatcgaacgaacgttatggcattatctcggattatcgaccggcccggtatttgtgcggaaaagaaccgggtattcggtaaagtcgatgatcggctctgttatatattatttcctcctcaacagattcattgacctctttccctctttgccttgaaatcgaatttcctaatccctgaatattcaagatgattacgtcatacttattgcccgcagacagcttggtgcttgttacaggtgccaatggtttcatagcatctcatactatcgaccagttgcttgcgaaaggtttcagagtgcggggcacagttcgcgctcccaagccttggctcaatgcctttttcgatgagcgatatggcaaaggacgcttcgaaaccctggttatgaccaacctcggtgatgcccaagaattggataaggcaatgaagggagtttcaggtgtcatccacatggtcagttctatacaaaaccatttaagaaggcaataacttcaaatttctaatcattttcaataggcatctgatctgactttcagctccgaccctaatgccgtcattccttgggtgaaggattctgtgctcaaggttcttgaagctgcatctcggactgagaccatccaaagggtggttctcacttcgtcgtcacgagctgcctttacctccttgcccggtaccaccaagggtcttactgtagaggatagtaagtatttcgcgcattcaagtctcacgcattgcaggaggcgcaaactaacatcctttagatacattcaacgacgattcagtcaaggcagcatgggatccagatacccccgcggatatcaagccttttgctgtgtattctgcgtccaagacagaatctgagaaggccgcatgggaatggatgaaagacaacaagccccacttcgacttcaacactgtgcttcccgacttcaatgtgagaattttcaattctaaagaaagccacgaactttactgaccaaatgtcttttcatgctttagaccggaaaggtccttcacccagagattggtggctcgaccatgggctatgtgcgcaagcttctcaagggagatagcagccccttcgagactttccctccccgtaagatcccattttctctcccagtcttttggaacattctctaatacttggtccctacagagtggtatgtcgatgttgaggacactgctcgtctccatgtcatcgcactgctcagccacgaagtgaagtccgaacggctctttgctttcgcagaatcaaagaactggacagaccatgttgaagctcttagcaaactgcgccccgacaacaagttgatccccaagcctcccgtgaacgaagctcgtgacgaagcaaatgtcgtcccagccaaaagagccgagtctctactccaatcattctacggccggccaggttggactccattccacgagagtctcgcagctggcatcgaagggttggaatagaagtgcgatgaagagctttatatgtgttcgaaatgagggcaccagccagtatatactagtacatattcatcctgaatgctgcatgacctctgcatgggaaatagcccacaacaatacatatgtaccggataatgcctggcactcgagacctttccctttccgttttagcgctcacctcttgccgctttttgatcaccgagtaaaaccgagcacgtctctgagacacggcacgtgtacactagggcatgtagtgatagttcagtgatagtcgccctctcggcttaggtttttgacgcgacgcgctgatcacgatctgtccacgtgggtccccggattttcgtgctccatttttgagactacataaatcgtggatgattcacgacctacttgaactgggggtggaaaattatgattaattactccgtgaaaagttttcgacgcattgaaaatgaaatctagcatctatgtcgcgtactagactcggccacttctcattacagaccgtagacaatagcaagcacaggcccaacaatcgccaacgcaggtatttcacagccagcagctaagccagtcgaagtcgcactcgctcctgtctctgtagcagcgctttgagaacttccagagctatctgacccggtcgtagttgtagctgtagctgtcacaacattatccgttgacgacaccgtaattgcacgcgcgatagtacccagagtccaagtaaaagtagccccactaacaggagacgagacaacaccaccggtattgtacaacttctccgtcccatttttaggaagattgtccggcgtgtagaaagtatccgtaccgcccgcaacctcatctccaaaaccaagtttcttacaagggaatttttccatgtaagtactacatgcttccccatcttctccatccttcaactgtccaagccagtagtctgctcccagaacagccggatctgtattagggcattcgtcccagatggtggatacaatcgcgctgtaggaacagcaaatgcaggcccggccatagtcggacaattcgtcggctgtaagctgctccaatgccttctcgtcattcccgcacgtcgtcaagtggttgtttatctgggtggctttgaggtcgattttcgcgaaattgcaggaacagccgcccgtcgcgtttccgggaaagggccagaaggggatttgttcaaggtcaactttcgggcagaagttgactaagttttcgccggttttttgatattcgcaggaatagacctagctggagtgtcaatttatggcagggtattctagtttgtaagaattacctggttccagcagctctcagccatgcaatcgatctcattggcattcttgatgcattcgcaaacattgatacagtcaatacctaggtttgggcattgagaagccatgcatgaactatcgccattgcatgctttgtagcatgcagggtctccgccagcgcagttgttattgatgcagctggcgtacctggtatccgcgtcttcgtagcatgtctttagaccctttggatcagcgcagaccgacgaatcgtcaaaatacccgactttctcggctagcacaattctggaggccgccaaagacagcaaaagaaacaatttaaatgccattttttaagcgcacacgagatacaaacacaaaggatgtgaatagggtatttatctaaaaattcatgacctgtaaagccgcaaggtccaaaaggctaaagggtcccaggatccaaagcgtggctagtgcttacgcccaacacctgaccaatggggctctaaaaagacttggcactcagcgatctcagtttgtttatagctagtccgagacgctgcttcgtttgattttgcccgaactggcttaatttgacgctttgccaagatcaagagccaattccggtgccggctctcctgtgtccatttgcaggggtacacgcttggaagcacgttggttccggggcggaaaagccacgtcttggcacgggatttgaactaactgatttttctacagcctcgggaaagttgttgcttttaaatggctcgcaatgtggcttcaacattggtggctttaaggcttgtatgagactgatagcgattttagggttcggaatagttcccgtgtctgctctttgggaaacaatttaaaccgcagtttgatcgaaacaagtgttccattcaggaaaaggaaaagggaaaggcttcgggagaccatctacccaaggcttggatgtggtcatcccttaagcctgtgtcgtgggtgtattgtgctggcccctccccaaaactgtgacacttttatccccgtagtatcttcccggcgcggttaagcttagagatgaccgcagttgaaaggcgggtgacgtgaagggaccggaagagagtgtaaatcagggagcagtcgtagactttgagtcatggaggaatagtttagaaaggccttcgacgggacaggctgcatcttttgtcgctgcaaggacaatattgataccttcgtggtttcggtcggtcttacttacttttaaagtaggggaagacatggtccatagtaggggtaaacctgatatcggccggggttaacttggtagcagcgaatacttcagtgtttctaagttcggcagctaagtatgtaaattttccgactcggaggaaccccgcgaaggcaaccctggcagcggcggcaagattagggtcatttttctgggctgctgagagccttagcaattgggtagggaggtgtgagatattccctgaaagaattatgactgaggccggtgagattgggttgggaactgcgcagagcaatatcctcttctggttccctgtgcaaggccattccagaccagctttgcatggccagcactcacgaaaatgggctgtcgggagaaataggtaggcggtggcgcctttcctatctggtcttgcccccgattttatgacgatcaaagagaaaggccacacggggctatttattttgtgttgagtttgtgttgagtcgtcctggtattgagtgcgttgacgatagttggctacgctcgttttctggaggatcccgtaccatcaaaaaatgcgtcgtgtctatcaaaacgcaaataaaatagagaagcgcatcatattagaatggtctagttttgaaaagaaaatatcgagccgctcgcgcacgttgcgctggctaattaaatgacatacttcgaaactgttagcacatctccactacccggaatagcactatgaacttactgggatgaacaggtaggggacttctttctcgtagcgcttccaggcctcgccgtactttcttcggcatctgttgatatccctgttggtgcgatggatgatcataaccatgaagaaaatgaagtagaaccaagggaacgggctcctatcaatagtagttagttaccacaacatcacggctttgcacataagaagtcttacttgaaaccggtgatcagaccccaggacatagagaaaaacatgtcaggaacatagtttggctttcggataattgcaaaccagccatcgaccatgatatggtcgcccgcatccgtttggatggttttgggattctcgatagcctgccacggcacttgagggaatgtgttccgttgtatgagctggcccttttccttgtggcggaatgcattcttctgaccattggcactgtcccacatccagtagaagaaaatgtacagagcagagaacactgcgagagcgtaaggattccagtggtattcggatgggtggtggttggccaagtagagagcacagtggcaatatgtgaagggcacaccggccatattccaaaaggtgagcaaaaagcctagcttttcaaaatacatgtccctggtatagtgtcagctcaattgtaactattgctccaacattttattaactcaccagctggtaataatcatctgctcagctttggcacacgcattggtatacaagtaatgtgccaccaccaagaagattacctcgggcgaaacatagccgtaagtttcgtactggcgagcagccacggagcaggtgatgaggaagagaatgaaccacgggatccggacttcgtaaaacatcttgaagtccaggattccaatgcggggattcagctcggcgcccataaagaaatcgtagattggagagcccgatagtctgtgggttcggccgcgcacgatagcttggatgtagactatgaagctgttcaagaagccagagaggatagcgacactcatgataggtccaaactcgtcaatcagcgtgtacaaagggaatacacgagtaacgtgtaggacaacagcgatggcgagcgtcgcatagaagctgcaataagcggagcagtagtaggggagcctcttgccgccttcgtgcctcaatggccggccgaaattcgaaacaccgggcatgtagcaatacatgagtgcctcgaggacaaagaatgtccagtatatcgcccaggctttcgcgcttggataagctccctcgtagaccagctgacataggtgacggccaaaatcagcccaggtctggttgggcttaggcataggaagcatgccatcatagtacgtggcaccgatccacatgtaccacatcaacaaaggaaatcccgtcatcaacagcgcagcaccgaatgaaccaccgaattcgaattcatctgacgcaccgtcagtaaacttggtcggggtagttgatccatcctccttgctcctattagctggaatagaagcaaccggttgggttctctgtcttatggtcattgccattgatcgacgtgggtgagggaagttgtcaggatgtcgaaagagaactggcccctgatatttttgctgggattagatatttaagggcatcaggtgaccacgcgtgcactcgtgtattctttggtggcttgggggccaaaacatcatttccacacaaaacgagtacctactcaataaaaccatcatttcaacctatacccctatagtagctataataaatttatgctacataggtccctgagatcccgctctatccttcgactatcaatttcctcgtttttctctacgcgtgctgagagatcggcccgagtagtggcggttgtattatacgattttcgcgcctaccgaattactcggcgcatcccgagcaaagtggggctgggaaaacgatttcaatacgataaaaattaattttctgcgtggcagaaaatagtcagctcgccattagtccgcagctgtaatgagtagacaacaatttacccctacgtttcctctaattactaacttttctacggtcgcattgagctcagatcgtaaaagtatgattaaaataccttttttaacaattgtatacgttttgacctaaatgcgactagtagaagccgatcagcaagcacggagcaagcaaataaccaagtaaggaagtaagtaaaccgggcgtcggggccgtcccgaggtcttccaaggtttccatccacccgtagaggtaaatgtgggtggagaagaagaggctctaatattacataccgggccgagaccataattacacaggcggtgactaaagcggtgatccaaaaatagccatccctgactttagcgcccttttgggtaatccctcttagcattcggagtcaagagatgacagacttcttcctatgttgtagttaaaccttgtcaactcccttttagtcctatcaccctggcacccctatggccataggatagcatttcctatttcggctgcccatgtgcacaaagctgttgaataaccagagaaatagtggacttttgttgccttcacttatgacatggtctattaagttaactaataaattattttaagtgaaataatatctagtccatattcctgcttcacacctcacccctgtgttctgtccatctcatactaccaattggaacaaccggccccatccctggaccgccgtcggatcaacctcacacagtagcaacatgtcccaaatgactgtgctcaccgtatccaaaaccaccacaccatgcgtcttttcccagtagttcacccgctgagcagctcggagattggtgcaaaaggtggaaatcacctgcacctggcggctcgcgacgtcggctaccatctcgtcgagggtaggctcatcaacgtcggcaaatgaagtgttcctcgacaatccaagatggcgttccttgctgcaatccacgccaattgtcttgtatgtctttataatggcctcctgtacgttgtccatgtacggtgtcacaagccccagttctgtagccgagagcaccttgagagctttgttcaaggccaatacggatgtcgtggccggtatccccgtcgccgcggtaatgagtgtgcacagctcttcatcggcggggaagcctagccacccagatgacgtgccactccagccaatgatgtcgacgttggcgtccgccagcagccttgccgctgccaaaatagcttcgttttggaattgctggagggcatcctgctcgaggctgatcttcaaaacggtaaaccgagaaaagtgaaccgagacattgggaatttgagcgatgactgcttgcgacaagggctcgaggctggtattggaggaaggtgtgagaattccgaggcggatacgcttagccattgtagagtgatgatttatgaatgcaatatttaacagctgaagaattggagctcaagaagaagaaatagaactaggattgtaatcaaatcatgaaagatttcagcttctccccgcattcccccacgcgggatacaatcaggaaatctatatcgcccgatctttcaatctttccaccaattttcggcctttgaccgagatattattcccccacattctgattggtctccccaagttactatcagtatctagactccaaatcagtcagaatgaccccaatcgttctttcaggaagtatgttgatgattggggttagagatggcttaataagaatcacactgtcctcttatttcgtgggagtcatcgtcagttgaactaaacaacccaaaatgtcgacaataaggcagcgatttacaggtgccaagcgggccttctccagccggcgtgcgctattggaagcagttcgtacagaaaacgacggggaggctggcctcttcggcagctggtcaaataaagatttggacccgtctcctccttctcagagaatatggacacgttggtctttctttgcttttcagtttagcatcgctttttcgccgaccacgtacaatgtcggggctagcctctacgctgtcggtctcaactggtggaccatcttgatagcttcctgtgagactatattacatacctggtggccgacggtgctaacatataaacagttatcgtttctttcttagtgggtggaatgctttggttgaactcccgtggagctgcgatgtatgtaacttcacatctaagtctagcattccatgtctaacgatggtttctccagataccacgtgggatatccgacttacgtgcgggcttccgccggtatctatggatccctaatattcatcttcctccgaggggtatgttgcagcaccagcaagacttgagagcacatctaattccactccgcaggcggtcgccattttatacatgggaatccagactctatacgctagttatttcgtgaacgttatgcttcgttgtgtctttggtcacaagtggactgacctcccgaatcgtatgcatacctgtcttgttgtccgttccagagctaactatgtcttcagatcttcccaagtcagccggtatcacatcgggaaagttggtttccttccttattctatggcttctccagttcccgttcgcatttgtccacccgagcaaaatgtcaaaagtgttcatggtgaagtcggttattgcaccaattggaatgattgtgacaatgatatgggcaatcgtaagcatactcttggtcttatttgagggcgttatggcttacaatctgttagatctctagccatggtgtcgatttccacggactcggacctagcaatgtgtctggggccgtcctgggctggtctttcatgaaagcaatcaacagtattgtttctaatgtgattcctccgttggttaattctcctgatctgacgagatatgcgaagtgtccacgcgacactctgcccttgtctattggaatcatcttgagcaaaccagttgtggtgttcctgggaatggtcatcacagccgctggttacaaacagtttggagaggtaatctatacatccagtgcttgctcattaatccgatactgacttggaaataggcatattggaatatgtgggatctctattctagtatcctagaccattactggagtccaggagcccgaacggttgtgttccttggtgcgggtattcaggtcagcaacctatttagcaagatataattgcccctactaataactttgacaggcatttgctacctttgctacaaacctcactagtaactcaattccagtcggatgcgatctcgctggtctgttcccacggtacatgacaatcatccgtggccaagtgtgctgcttcttattggcgtgggtagtgggtaagaaatcaaactattatcatagaaattcaccagtctcaagctaatcacactgcacagttccatggaaaatgacctattccgccgcgtccttcctgaccttcctcaactcatacctctgtttcatgtgccccattgtagccatgatgatgtacgttcccaaatttgccccggaatattcaaccactaacgaaccctctatcagtgttgattactggatggttcgcaagggaaacatccatgtgccttccctctataacgcaaaacccggctctccatacttttatactggtggcttcaacctacgcgcatttgcagcctggatcggggcaatcgtccttgtcattcccggtgtctctggcgctcttcaccctggatcgatcggagacgctgctgtcaagatttacaacatgggcttcttgatttctaccactttcgcggcgctgttctactatatatgctgcaggatttggccagtgcaaatctatcctaccgagctgggggcaaaagacgctagttgggaggccacgaggtacacagagggctttttccctgaagacgaaatcgtgccggactatttgcaggaaactgtgattgagggggtgacagtggggccttcaaaaggctcgttggaggtagaatccgtcaacatgcggaaggagggaatgttgtaatggctgaacagtgattttatgtgtttgatggattttatgtagcttttggatttgaaccagtacgtagtaataagaattgttaatcatatttccttgttaattgggttctgataattttgacttctccccatctccattgctcgtaaattttctcttacatttctaccgtagcccctcagcctgtcctgataatgcctcgaggctgtcaaggcaattaccatctaaatgtccatatgaggcaatcggacctttccgcaaagataaggccgtgttccttggcaaacgatcgggcgatcgggcgactgatcggggagttgataatattgttgataatcggatttcggaccgagagagtatttagcaccaatgagactaaaagctaagttttttatcaaagcctcaaagcaaattcgcaacaatgaatttaccctcaatggctagcaaattcgatctggtggtgctcaacgggaaggtagtcactgccagtgacatttggtatgttgttctcccctctagactgtctataacgtactaacaaagcgaagcgactattgcattgggattaaagatgggaagatccaaaccctcgccgagagcttctcggaagatgagatagcaggcgccgaggtcatcgatgctgagttcgttccaagtaggcctcatgacgtggatgtggaactctaaccattgcatctatagaggggcatatgtgatgcctggtggaattgacgctcacgtccacttatgtcaagatttaaaaactggtgagttggtacctcgtttacaatagacttttcctaacattaccaggaccacacggtctaggaggtgaatgcgccgataacttcgagacgggctcccggagtgcagtggccggtggcacaacgacaattatcactttcgcgacacagaccagaggagaagaagaccgaagcctgatcaaggtcgtagagtcttataacgcgcgtgccgaggagacgggcagctacgtggactatgggttccatatcattattgttcgcaatgatgccgacgtgctggagaccgaactcccgattttgaagaaggactggggcattagcagctgcaagctcttcctgacgtatgaaacacaacggttgacagattcgcaacttttggatgtcatgtgggctgctagaaaaaactccatcactacggtaagtatatttctgaagagaaacgaacgacgctgattttgtagatgattcatgcagagaatggggacatgattgcatggcttacacgtaagagtgattgagcacggtgaagaatcagaagctaatcggatgacagaaaaactcgaggagaaaggcatgaatggtatgtctatttacactccggtctgttgaaattttgcttacattttatagctccatactaccacgccttgtctcgcccacctcttgtcgagggcgaggcgactaatcgcgccattgccttagcgcaattgatccaaaatccgattcttttcgtgcatgtcggctctgcagtatgtctacctctctgtcatctcagactgaagctaactttttcagcttggggcggccaatgtacgtcgggctcaaaatatgggattacccgtgtacgctgaaacatgccctcaatatttccatttaacatggaatgacctggtaagtttcctacatcgatcgacaattggcaagtcctaagagaagctctagaaacggttccattcaccaacttgtttcgaaaacagcaaaatgatctgctcacctcccccacccccggatgcttctgaccaggaagatttgtttgtgtaagtctcgtgtgcaagtgtcataccagtaaattcctctaatttgcatagtggccttcacaatggaacattcacaatttactcatccgatcactgcccttttcgctacaatgacccccatggcaaggcttctggagtgcttgagcacgccaaaagcatggaaggggagtcaccgcatgcctgcgatgatctacatgacctcttgacacgcaaggaagggtcatttaaattgattcccaacggcattcctggtgttgaaactcgactcccattactctactctggggcactatcgactggccgcatatcaccacaacgctttgtggaacttacgtctacaaatccagcaaaactggtgaatactcttcaacttcgtctatcatcctatgacatcgctaactcaatatagtacgggttatatcccaaaaaggggacactgatgccaggatctgacgccgatttggtgattgtgagtttcaatttcctgctacaacctccgattcgagtttctaacattgcgaaatcagtggcaccctgagaagacgtttgagccattccatcttaccaacgcccaactccaccacaatgtcgattgtaaggaataaattcacaccatgtctacgcatttaactgactgcattacacagatacgccatacgaaggattcaagatgctcaattggcctcgttatacgattctccgaggcaaagtgatgtgggccaacggtaagatacttggtaaggtccgggatggccagtacgtgaagcgtggtccaagtcaactgagccaaggccttcctggagccgatcgagacccacgacgcgttgcagcttggctctatgaatgaaataagagtgtaatgatgcacatactttggcgtcttcatagacttatctagctgagacaaacacgatcaatatagacatggaaaatagagaatacaaaatgggattatgcctatcccactcatcgtggaaaacgggaacattggctctccttctatagtcccaacttcatccttattcctaggcacaaataaaaattacgtaaggtcgcaccttccgagattattccgaagataagaagcttatcgcccgaaagataaggtttcccgtatccatggatatcgcgcgaaagagaaaggcaaaattcccctatcacagcaccttccgggtatggtatggtaattcgggtatgtgcaggaagaactgtcaatcggaaaaggaaagcttggaagaatcatccaactatcttactatcaggtcagccttctaatagatccatggatacttccaagctcctgcggccattccagcagacgcggtcatatgtggctcacctcggctcgttaccatataagcttatcttcccaacttgcctagcctgcacaacaattgggtggtaaccgttagcccccgtcccccccacccgggcccgggccccctagtaaatnnnnnnnnnnnnnnnnnnnnnnnnnnnnnnnnnnnnnnnnnnnnnnnnnnnnnnnnnnnnnnnnnnnnnnnnnnnnnnnnnnnnnnnnnnnnnnnnnnnnnnnnnnnnnnnnnnnnnnnnnnnnnnnnnnnnnnnnnnnnnnnnnnnnnnnnnnnnnnnnnnntcggtcgccacgaccgaggccaggcccatgtagtagatagctctctcctcatttctctcctttgattttccctgtctgctccactacatactggagcagcacagttcttctctcatagagatcctcattgtgtagcagtttctaggacaaccaatctctcgtctcccttcgtgccgtcgatggcctgcccaaatggatcactctggtccaaccgggcgtgcatatagatcgaagatcaaacggccttgtgaccgatgtcgactcaggaagacagcctgcgtccttccagagggcccaccctgcaggagttgtttcactaataacaaagaatgcaccttcaaactgcgtcccagattgaagacccggcgtatgagtacagaaaatcaagctcctcacgctactgcgtcttacgaggtgccaaatccaacattgcaactcagtcctgatagtactcgattgcaccacgacccgttcgaccaggacaggggctactcctacaatgatccagtccaaatgtggccggggcaacatgctcaaaatgagcctcaacctgatctcatgacccgtcatacctcaatggaatctatggatgaccatcctatcagtccggatcaagagtcaccacagcaaatcggggccattaccagtcctgcatcgcagcccgttcagcgcatccggtcgctagatctcattgaaggatcgatcgcgcagttttacggcatgtcctcggagtcagatccgtggctgcttcgacattgccgatacgatgaatatggcatgcgcagcctgcatcggactcacatccgtaatgtcggtggcgtccccgttgaagggctggtaccggtccattttcttgagaccgagaaggagcttatgctgccaaaaggctcagatatggataatcggtctcagaaggacgtgatgcaagaccggaaccaactcaatgatatggtctccccggaacacggcaagcggcttctatccttatttcttcgattcgtgttcccagccgtcccaataatatccaggtcccagcttggtattacttcaggagtgtcgactgctgtgttggagaagatccccgttcatttgcttgcggcgatttatgcctcggccatccctttcgcagtccatgactcggtgctgtgtgtatctgccgcatatggggagctcttgtccgagaagctgtggcatacggtctacgagcttatcctccaggagactcacacaccaaagctggcagttttgcaagcatctttgctctatctgcaacaaattcccgccggaagcctgaaagccctccctgatgggccattcatttggtctttccttgggtctacagtggccctggctgtctccctcggtcttcatgttgaaccccggccatgggggattcccccgtgggagaagcgcctgcggaggagactgtggtgggcagtctacgtagaagacaaatggcggagtcttcttacgggccggccttcatttatccaccctgatgagtttgatatctttgaccttagtgccggtgatttcatccaagatgagaaagccgacgaacatgaccataattgccagcctcttttctactacactacaggtttggctcggatcatcgagaatctgcatcgcacattttagtaagagcaatccccacccctggttaattctgctattaattgaacagtactataaaagcctctcagagagtatcagatgactttcgcgcgtccatcgacgctgcacgacccatccgcgcccagcttcaacaatggtacttatctcttcccgatactcttcgactcaagcgtggctccgtttcaaatagccacatagcatctgacccaatcgagggtgcgtccgaccttcatttctcatacttggttcttgagatgttcctttaccgcgccattctccgtcctcttgcccaatcaccgccaccgccaccgatctcagacgacacagatccaaccccgatgggagctttctggctcgttgaagacctaacgttcgacactcacggcttcgatcaactcccagccatgaattccatgcagcttggcgaggctgaagaggctaccctcaaggctgcagaaaagtgtgcggccatcatcgtcaattttgtaggagccttggcgccccatgagtttggctccttctggcatccttgtaggttatccgttcatccgcttctaatgtaatgatggaattgtatactgactatctattttctagggaaccgaatctgtttcgccgcagtatccaacttcgtcactctgctccttgttcaagcgccgaccaggcaacatgcattgagatcgagggatttgcttgagctgtggtcacacacacttcgttgccagcactggagccacgaaggcctaatgaagctaggtctagtgcgactaaatcagatgcagatcgagggattggagaacatcttcaatttgcctgcgcatgtatccgagatattaagggatacacagcaagattaaatccctagtttcggatatatggtgtacaataatgataaaaacacaggcaagctagttcacattttcagagacgacaaaggatatgaaacgatttttgccgagagacgcaagattgcaaacttgagacggtctgattattctgatatattatgcctaatatgactccaattcaagctgtacgatactaaacagataactgtctttccatagcccaaagaacaaacccttgattgtaaccccaggtaaaaggaggataatattgttcccccacgacgcgaaacccccttttcagccaataagcaccctggatctcgcgaatagatctgagcgtaatgcacaagcgagacaattcaatatgccccacaagagccattctcctcttcagctcctcttcacaagccctgattaagcattccgcaatgcctttcctcctatatcgaggatccggcttgatcgcaacggctacaagctcgaacccgcccttccaatgcgcatcccggtgtttatcgccagaactatccagcaccgcagagctcgcggagaagatctcatccgcagtgaattgttcagaatagcccgggaacttccacacgtcttcgggatctggcgagctgatcttcaagctcgcagtaccgatgatggaattttgagcgaatgcaatcgccgtgaagccggtttcctggagctcgtcagcgagctgggtgtcgcttttgagtcgaagtccgctctttttgtaagaactggcgccggtatcgtagtagctggcgttgatgacgtcctggagctcttgcagaaagggctgcttgaggagatcgctttgtgtgaaggtttcaatactgtaggaaggtgagccttctacagtcgtagacattttgtggtagaaaaagacaccaagatgaaatgcggcaaagcgtatgatttttaagatagccgcaaaccccaattaccccaatagcagccagtctgtgcgcttctccacggtttcataataagcaaagctaaaagtacaaacaaactatgaaactctcctatagtccctctgtaaggtgcctgagaagaccatcagaaaggaaagagcgatggaaccaagacataccaacgttgtcacagtctaaaaggcttgaagttagatgtacatcaaaacgaacgaaaaagtaaatatttcattaactattgcactataaatccttacccattggtatctccaaatactcaaccattctctccctcgcacgctcaacctgatcccgcacatccagatcccaaagccacttaaaacgccgatcaagggtatctctcagctttaccgggtcatcacgaaccccctcaaagcacaaacaaagaatatctgcattctccttgctgctagtaacaaccctctgactccgcggccgacgaatctcatcataagccttgaaagccgcaaccacgccgacgacagagctgacacgggaatcactcagtagttcggcgaggacatgtgcatcttcgatagcctggccagcgccggcaccctggtgcggcgtagacgcgtgcgcggcgtcgccgaggatggcaattctggagcgggtgtaggttgagaggtgtggatgctcgaagatggcccattgggatgggtcgggcatatgctagaagaataagataagtaattcacttaaacgcaaataaagcatgaatcatacctcaacaagagccctcacataccgccccatatccctcgtatcccgctccatatcttctctcttcgccggcctcacccaagactcatattcccaatcctgcgaactcaacacataaataccaacattaaccaaacgagcccgcataataggataagaaatagcataagcgccgcgcgcgacatacatcgtcgcgaccctcgccctcctctccccaaccgcactcaccatatcccccatatccaggacagcgcggtatccatacataccactataaaccggtttcgcacacagcgagtattccaccggaaacatgcactccttaacccgcgagcgaatgccatcacaaccgataacaacatcagctttcacgacctcgccatcctcgaatcccagcacaacgccgtcatcaccttcaacgagcgtgctgagcctcttcccgaaatgcacgatctcggcggggacgagctcaacaagcgtgtttaggaaatctgctcttcggagcgctgtttggccagagggtagggctttcagatccattagtacgtcgccttcttgtgggcctgttgcccagacgagctcgaaccaggtctgtaggtaagaatcgtagccgggactgtctgcgtgggtggttatgagggagttgtagatttgttggatttgggggtggattagtggcattgcgcggtatgcggctgggccgagggagattcctaggcctatttctttgaaggttggggctgcttcgtagatttggacggggattttgcggaggtgcaggccggctgctagggttaggccgcctattccgccgccgattattgttattgtgggtttagacatggtgagttagagatagacggatgggggtgtgttggtgattggaggtgttagttatatagtttctaatagtttctgtgagttgtttaaatttgtcgggggttttcgtgagagtgtacttgtgtataatgtcgataaggttgagtgccatagtgtatgtactctatatcccacatgggcgtatggtgatataaaaccggactagtaccacaatgactgtatgtccgacgtcgcggagtcagatagaggggtgcaagctttcgaaaacgggaaattttcgaatggaagataggggattggacaggccagggaagtgggctatcagacatcccgcggtggcccttgatctgcactgttagcgcggtgcgtgtaatttgccgggaagtgcacggcatggacgaggggtctacatcgtaggacgtcaacgctgttacaaggattgtcttgaatggagaaatatgacattaaacctggaaggtaaaagatatcgccaatcgtcacgcgtcacgaatcgtgcgtttgcgtgtgcaactctaatctatcgtgtgtatcccattccatgagacgagagagcggacatgtgctcgacatgtagcgcagcgcggtgatcgaagtcgcgatcctgtcgcggggatgcccctaggggtctgaaatggcgcattggcatgtgcaaaaaaagacaatcctaaagtacattgtactcttcaggaagtctagatatatgagaaagaaaagaaatatccgctagaaaaaaaacgggaaagtcgcatatgttgcaacatgaagaaatcaaatcataggagcggtcactacccgctgacgctcccactttggaggaccgaatggatcatcacgggagtatatatccgaccgatcccaatcggagtcgctgtccgcaatacccgtgtgcttatcatccgaccgcaacgggggagaactgttagagtcatctagcgcgcgacggaagcgaaggaactgccgcgattccatattcgcaggctgcatcatgcccattcccatgcccgactgcatggactcgagtgctgcacgctgcaggtcgcgaatgtcattgcgcagaccgccgacctgtgtttctaagtttctgcgggctgtttgttcgcggcgcaggagcgtgactagcgtgctatactgctcgattgagacgccgtggtagtcggacagggatgtggctgatgggacggggcgaagggtgcgcgtgttcattgtgtctgcgcgtattgtgctcgtgctggaagggcgggcgggtatggtcgggagagggcttggggaatcgtcgcggtcgctggtggataggaatgcagttggtttgctgcgaggggggtaagattctgctgaaggcggatgtcgtgggcgggatagcttctcggtgggctcgggcccgttggtttgcattcgcgcaatggcgaattccaggtcgatgagtttcacttcgagcgtggtcaaccgttgttccagagtgacgccgtcatcttggtgcattgtgttaactagatttgcgacatttgatggaaggctgggttgttctgtaggctgctcgacttccaaagatggtgcggcggacattcgcgtcacactcgttactgttgtccccgacgaccgcctcctcgactgctcactattagaactttcatctaatggcggggactgcgaaacaaccgaggctggccgcgccggggcggatggtgtgggtttccaagagctcagagtctctgggaggttatttgtcatttcgcgcaatccatctgcgctccttgataagcggtgcgagagcaagctgtgtcttcgctctggcatgtaacccctatcctcttgcggatcagatactgccgacgcgacggcaaaccgagagtcatcatctgagaagaccacactgggaagcgttgcccgccttcggcgtggcatgctaccgggaactgaatcacgaagtgttgcagaggagagaggggacagcggagacaaatgattatctgcgatctggaggttttccgccgagagtggactgcggtgtgaattcaaattcaagggcggcggaacagccgacggtgatttccctttcggttgtccacctctccgcaccggtggcatgggcggcaccgcaaaagtagattcgtatgggtgctcctccagttcatcggcctggctttgtcttttgcgattgaagatcttgcgcatgacagtcttcaaggtgctcccggttcggcggtgggcaatagagggctgtgagtgatgggagtggaattccattgacggcagcgccgtgtcgtcatctgccttgtacgatgtagggttggcggagcagtctccccgggcgggaggggttcgctgtatactccgaatggactcgctgccagcgcttgctatggatcgggtggggtatctcgacatggtgtgtggagggtcgcaatggacaaataggcatagaaggtaagggtaaggacttggatcattacaagctgggtatatggcgcaaaagaaagaagaaaaaaagaaaaagagttcaagcgagtgtgagaatgaagggtataagggtatcaattcgaatcaaggctggattttagtcgagtgagactattgaaagctatcaaacgcatgttagctgaagaaccagggtgggacaaacggaacatacagtgttataatcaggaacataatgaacacccagatcttccagtttgctctgaacaaagagaaaagaatgactgaagaagaacaaaggggaagagaagttggagaagattagggagggaggaagagggaagacagctattatccccacaccgttctttctttatgccacgccagaattgatgtgttgaccacaaatacaaagtgatagttgactatttagtcagctacctaattgctcaatgcttcataaatggtttatgcaatactaaatactctactctatcccattctacctacttccctccctcccgtgaaagatatctgaaacacgccgtcctcaggtgacacgatgcagtttcaacttcaacttcacttcaacttcatttgtccacgtagggcctttgattcatgctatgcccctcagtaagaagaatctcattctccattaggaaatccatctccggcattcttatcttcgtgtcaagtcagtatttgagttctttaggttctttagggtgttctaccccctgtttctcccttgcataggccgtgcactaatttattttcgacagcgatcggcgttgttctggaactcccatctatagcaaatctccagcgtcgggataccgcagatcggcattttcttcgagaaacgccatccagtgcttaaggaaactacttccgctgtaaaaagatcagcattaaccctcaaactaatggcgcatcctgtacggagtacgtactgactgatcgtctccgagtctccgcaaatacacaaatgccgcttggggcgcgtcatggcgactatacacagcatggttaatatattttcgctgtaggtataacacctatacagtctgcaaaaaaaaagagaaaaaaaaaaaggaaaatcataccattcaatcgtcgtttctcacccaggaaacccacttcgtgctccgtattgctgcgcactagactcaccacaacggcttctttctcacggccctggaatccatccacactaccaagttcaagaccgggatatttttctcgtaacatccgcgacagtagagccaattgcccgttgtaaggggtgatcacagcaatgctttcgggcctgacacccgcatcaatcagattatcgacatgtctagcaacgaccatagcttccatctcgttgcttttgctgtctccaagcaaggctcctttctggctgatctcatcctcagccttttcggggaaatccccgccttgcgtgtcccagaatactagaggttcctgcgtgtcgtctgtaccctctacttcatagggtaggtcgattagtagacgggcttttaccgcgtcgctagctatcaatttgccctcgtagagttcatccgaggggaatcgcatgatcttctcatgcatgcgatattgcgtggtcaacatgcgtttgatccccggtccgtgcagggctaataaacgatcaaataatgtgcgttcgagggagacacctttcaatgtctcggtatcggtgttgtcggtctttacctcgctcttggaagttttatccttctgtccggtagatttaacggtcggtggtaattgcagatgatcaccagcaaggaccaccttctctgcacccagaagagaaatccaacattgtgcttcgagcgcttgactcgcctcgtcgataatcacaacatcgaacttctggttcttgagttggtgaccgccagccccgtgaagagtagccaacaccacgctactctcccgcaccagattatccacgcatttagactcgcgctgtcggaactccttccgcagcagcttcaaatcatcataaatacctcgccgttcgcgaccagaccgcgttttgcgaatactagcctgtttttcatcaatctctttgcggatatctttcacaatccccccggcatcagaggtctgcgtaagaacttcaagagaatgctcaagaacagaaggaagcagacgagccggatgcccgatgcgcacaacaggaaccttttttggagccagacgttccacaatattatcaaccgacacgttcgacggtccgcacacgagaacgcgcttcttccgctgaaccaattgcagaatcaattcaatgagcgtatgtgtctttcccgtcccgggcgggccatgaatcagagcaatatcccgcgaagccagcgcaaaccgaatagcatccttctgcgagtcattgagcgtgggatcaagaaactccacagttccacacgcctcagtatccagttgtagcggggtcgtatgcccaaacgcaacacgcatgaaatgcgagtaatcagactccgtcatcttctccatcttctccatagtctgcctcatcctatccaggagtcagcaaccaagcaatcccaaaccaatattccaagcaacatacctcctatacgtaacatcgttagcaagcttaatagcccacagcttcttcccccacagctcctcaacagcctcatcatcctccttagacgttgccccgccctgccgcccaaacgcaatccacacagcgcgatcaccagtccgcgtaacaacgccatcaactcccttctccgcatctttgttcttttccttatctttctccttccccaccttcttccccgctcccgcaacatcactaactcgcacaacatccccgacgcgaatcccatgcgacccaagacgaggcgtcccatctgctgcccgtgactcatctgatgcgattgctgggtctggagcgaactcgccgaccacgcggccgccgaggccggttcggcattgtgagaggatgaggcctgttagggcgtagccggttgcttggagggttcggcgggtggagggggagactgttgcggctgtgctggcgagtttggaggaggagacttcggcggcgtgttcttcgaggaggaggttgagttgggttgaggcgaagagggggattgggattggggatggaaggggcattttgggcgacttgggttgtgtggaggttgtagatgggatctctggagagatactgcgtgctccagttgactggcacggtattttgttggtgtagattgaacttccactatggaggagttgttgagctttcgaggtgcggggataaagaagcttcagtcgcttatgtccgagctcgggatgattttattggctgtgggtttaggagcttcacatgtattctacagcaagagaacaaccacgaccaagagctaatgaacccacgttgttcgtatccaagacagcactactggggtgagaagctgccaaccgtgttaagtccgcattcgattcactaagtatgccaccttggactttcatgttgcctggcaaaatcttagtcatccacgacatgaatagaccgcctgatataccgccttcccagttaatatactgccaggaggtcccgaggttcataaggttgccccactccccaatttccccaactccacaacatacctctctacaatatacagttctttttgcgacttccaaaccacatcccctagcccaagctgatcatggcgctcccttcagaattagcagcgcatctgagccccaactgagtttccactcacagggaagagaaattgaggagacttggtagacgacgtttctatatttcatgacaccaatacctatcaggtttctaaaatcctatgtcaactaccttccaactatctatcacttccaatgtttacaaggcagtctaggggagcacgcaagaactgcatcattcaatctatcaatacacgtgaccaaaatgtcttattgtcctttacaggcactgctctggcctgtaagtttcatcgcctttttggttttgttcactttttttaacctcttcctaacgtatctttagaggagcgcccagtgatgcactattctaaggccgagcgcaataatagcgtaggccaacttgcgaggctggttcgtcgagtacagtcgcatacctgcaatacatattgccaaaggaaaaacaaaaggcatatcaaaagctgccgtgaaagaagaaaaccgggtggccgaattagttcgcctggcgggagaggagggccctcgcaccatcgtcctcatcaaattcatagtggcgggtggcactctcaaaaggaactttcgtggccagctgaagaccctccctgtctgtcggaaaaaagttctagtgctccctcaaagctcccaactttttctacagctgataagacactactacaatcagacgacgcaaaaatattcatgtactccattaacccagtcgctatggttactcgcttagtgctttcgtcagcctaccaatttgggtaggaattcattttcctactcttctgggccgcgcgacataagctttccagatatgttacttcgctatacgggattagctagaatagcgtgctggcccacgatctaattggtggcagcccggcggagatgtccagaatggtcacattgagttaggtgtgcgcggccatcggaagccagtacgtccatgcaagcgaaagaacaccaatagccgaagttgtctagcaaaaaccatcccttgcggaatattggtgtcttgacttgtgatgaacaagcacaacttgatatacgcgttggcacgagtgagttaccatacacgcttctctcaatcgactttttatttactaaattctatagcacttcagttcattttggggttcgatcttgctacgactatcttccgccttttattgttgagtcagatcggagcgaattctggaatgcattaatgaatgatgtgagcgcggagatagttgtgctgccgctttcattgagtggaatttcaccgtcgaacgcgaacgggagtcgtgagtggttctgtggaactatatatacggaatcgagatggcatgccggtgaaccgccaaagtatattaaagacctcgagtttcagtagtcaatttactaacggcgtttaggaaatctccctaatttacccggaatcacaaccggtcaaagattgaactgagtcgccaagaagcatttggcccttgccttttcccgacccaacagttccaaacctccaagcgatatggtgtaccttgtgatgatctaaggggaacgtacctgccactgcaaaaggagcacgtacaaaactggggaacagaacgcacaaatagttttcctttttctttcccctcttgtactcggtatttggaccaaatcgcactcattcatctgaattgatctggcacgtaatatctctgaagaaagacgatctacggatactagcgcttctaagtgcaaaaatgcctactttgctttcggtttcccacttcccaatggcatgacagttctgtgtgaccggactagtgccatattcgatatttgtttcattcacggtcgacaggcgatcgagagagttggaccgccgatgttcaatccacgccctggccgagggaactgcttccacggggctgcgattcatacttcatatccaaattagacgtctcgtcgaatgagctggtcgactacgctacaaatcttctagataatttgtcatcggaccgagaatcctgcaatgcatcttcccgcccgctcatttttggcacccatggctctgggaggctggtctgcaagaaggcgaccctacctactatcgcgagacaatccgtaaacacatatccagggtgtattccgtgctctcaagggtccgatatcgatgggtactcctcacaagggagcttggatggcggattgggccaaaatttctgccactatgtttggtttcgtggagtctaccaatatgaagttgctaggtgtcggctatgcgccccgtatcatatgggctgatcataccgatcataggaacatggtcaaatttgtgtcggtggaagagactggttttaggaggtggaattatcaacgagctagatcggttgacccctgaaactgttgctgtctcatgtcaggccacggacgctcggttagacctcgtggctacaatccttcgcggcctgatgtataacgacagcatgataagactggagaaaggggtttgaggatgtgcagggttcaaagagtggtgaagagtcgccctccaataccattcttaggctagggtggagattgtagtttcagataccagaagagatggggatggcttaattaatagagatggtattttctatgtggctttccctaaggatagccactgtttcttgacatagtaaacctctgtatagaccctttaatcctcccggtaaatcttgtgcaaaatgtctcgtcagcgccgagcaagtgatgttatcttcttccatgagcttcacaaaaagactgccgtttgtaacagactatgaaagttagtcgccggtcgttgagcatccgaatatagaatgccattcaagcaagtctcggaggaggcgccctctagttaagagattggttccttcctcagccccgtcctaggttccagggttggttggggcacagatcctcatttgcctgttggccatcgtgacctgtcattggcgacggcgaagcactgaggattgtgcgtgacagccaccagcggcaacggtggcccaggaatacagcatggctgcccccgtgggcataaccttccaaacaaaggagtcttcgacggttgaatcaaagaaagattagcggtgcctggtccgtgcgccatgtgataattctcattcgaagccacaatttcaaaggctggagtttcttcgacgaaaaatcatatcagaccgttataaaaaaaacgtatgacgccactttctcttatccagaggatgaaatgtagaaaatggaccagtaatccacaagcagacaagtcaatcaaagagcctcgattttgaccttcggctcatcaaccgcgggactgcttttcaccttcttcactgtcggctcaagccctcgaatctcgctcttacaaagtcccaaacccgccagatcacaatccccgcagcgacgtttaacgggcaagcaaaccgtctgcccaagcccaacaagcaacttattgatctcatgccatttctcatgtggcaaccacgactgcagcgccttcctcgtctcctccggcgtcttagttttattccaaccccagagattggtaatgcgatgaacatgcacatcgacaccaattcccaagtgtttaccccatgccgcgctcagacagaggtaagccattttgggccctacgccggggagtgccatgagaccctctggagtcgaggggatatccccgccgtactggtctcgcaagatcagggcggtagctttgatgtattttgttttgttgttgtggaagccgactgtgcggattaattcgtttagtcgcgttgggtccacggctaggatgttggttaggttgagggtgctgtcggtgggttttgaatcctcgttctcttgtttgactttgatgtctagggctggggagctgccatctccgagctcggtgtgaagacgttgcatcgctactgccgtgactgtgtcttttgtctgggatgagagcatcagtgcgatgagggtctggaaccgacgatctcttggcgatgacgcgcgccagtatagctctgagcagcccattgtgtctaccggtgcagttgggttgtttgccctcatttctttcacgatgttgtacatcgtctcccagttggacgggggctcgaccttgactgagccatcttcgtcgcgggtttttcgggcggggagtcgtctttgtttgggtgctggtgttggtttctgatcgggctcatccttcacgatattgtacatcgtctccgaattggacgggggttcgatcttgaccgagccatcttcgtcgcgggtctttcgggcagggggtcgtcttgccggtgttggtttctgatcaggctcatccttcactatgaccttttgtagtttgccaggacttgcgctctgtttgaggacgcgtgtggttatgaggctcgcgttgcgcctttggcgcttcgttggtggttcaaggaggtcttcgatgtcggccgtgtcggcctcagagagatcggagagctcggagagcgaagattcatcctcacttttgacggcagaccaactcggagtcaccgagacagtttctggttctatcttcacggtcggagtcgcgtttgggttgtaggcgaaacttttcaaagcgctgacattgcagctacgcgtctgtcgtcggatagggggcgagagggcctgcagcaccttcgccgtgtcttttgaagtgcgagaagtgcgcatgtcgatttaacagcagttgaactctaagacagtcaatagccagtcgaaacggttggaaagtaatttcacgtgagtgtcctcggatgatcgatccatgggccggccagaacctccccaacctcggtgcttacagtgccgaccgactttcccaactccgtgggggcgcacttccatacacatctaatttataccgtctaccatattcgacatgcagtctcaggcctctccttttatggcagcaaagcgactctcgaaagagctggagacttatcaggaggagggagagaatgaaatattcctatacctacgtcccgtcgatgaggctgatctactactctgggaagctgtattgaagggcccagttggaacaccgtacgagggtaagttcacgaagtccagatctcgatctccggtcgggtcattccacgccgtcaatctaatgtggcaacaggtggactttggcaccttactattgaagtcccgccgacctaccctaatgcgccgccgaccgtccaattcacgactaaaatcgtgcacccgaatatcaaattcgacacaggcaaggtctgtttgtcgctcttggatgacgattggagtccgcttgggggtctcgcggccgtagtcaaggctgttcagctgctgttgaccgaaccaaatccggattcgccgatgaatgttgagatttcgatactactgcgcgatggggatgtggctggttatgagagtgttgtccggtacctgaccgaggagcagcggtgggtggaagatctggctgttggacggtgacgatggtttcttgaaccagacataccctaccgctctgcacattccgatcatctcatctcgtctcggctaccctgcgcctattatacatacgagtccccgaatcctcacattctgagccacggagttcacttttggcattcctaccatcttgcataccttgcatctacctacatacgaatcgacgaatcaacgagtcaataagctaagagtttaataattgagcacaatttttgcatgatcttcaatttcagagcgaagattaagactgaaagtaatcacatgaagactagcgtgtgctatgcgctgtaaatgttggagaccgctgttaaaacccgagaaacaaaaggtcaaatgcggcggaataatgaatgccagccataaacgcccaagaaaataaggagagacaagagcaggggtcgtcacgggtcatgcagagagatagtacaatgacaattgtcatgaagatgcagagccaatgcgatgtgctgaaaaacgccgttcgaaatgataatgcaagttaggcgagaaggcaaagaattgttcatccattagagggccattgcgaccacgacggcgccaccaaccatggcgacgacctcacgagccatgccggtagccatcgcggcggcattggtttgcagaccgggcttgccgacggtggtagtcgaggtcttgtgggcggccgtcggggtgatgactgtgatagaggtgatggtgctcaggctgccatcgggcaaggtgcttgtgctcttaaaggtggacgtgctcaggctggtctgctcggtggtttgcgcagaggtagttgactgattggtggtggacgaggtggatgaggatgagctggacgaggacgaggacgaggtgctcgtggcagtggacaaagtcgaagggatactggtagtcgactgagtggactcggtagtggtagtcgaggacgccgtagtggcagtggtcggctgagcagtggtggaggttgaggctgtggtagaggtttcagtggagaccgatgcagagctggtggagctggtctcactagtagagctggcgctggtctcagtggtctcactggtggagctagccgtggtactggttggctgagcgctggttgttggctcggcgctagacgagctggtctcactggtcgcaatggctgagctggtctcactagtctcgctggtcgcactggctgagctggtcgtactgggtgcactggtcgcgctggtctcactggtcgcactgggcgtacttgtctcagtcgcactggtctcagcagccgaggtggtggcgggctcagaggtggattcggcgctggctgatgtcacagtagacgccggcagcgtggttgcctccgagctagcagtagcattgtcctggcgcttggccagtctcatcaggctggcaatgacgggttcctcaccttgcagagcttcggcggcatgaaggtcagtctggaagattccatgacggaatttggcggagagagcatgcaaggcatcatggagcgaggctgccttgatgtcggcatcctggagagactcacgttgcgaggtcccctgcactaactctgctgcgaagactgcagacagagcgagcagcgtcacaaagagcaattgaagcaagctgatacgcagcatggtgagtagttgaagatcggccgatctactgataaggtggatgggtaagacgaggaagagagggggagaaagagcaaaagaacaaaggtgagattttagggaaagatgagtggaagaaagcaccaagacccatagtggcgattatatcgatttttcgtatctttcttgattttccgtcgcactagtgaagatacacccgagcatcatcggcgtggctgattttttcaccagtcacacatgtcggatcggccccaaacgaacgcttatacagagccgatgtgaactattttggacgttatactatatttgtactatatttgtgcaggccacgactacagcgcaaaagtaaaaagaggccgttctccactataattggccgggtctcagccctttagggggctaacaatagcaaccgtggaaacaagaatagaagtgttgtcatgcaatatttcctttttactccattgggagatttgagcggcaaaaggggtatgtatttcccctggagctctgattcgagcgtcattagtataatatcaacttgagtcagaacaccctgaactagttcctaactgtacgaataacaatatcggaatcccgtcggatccataacctccccgaccgatcgagaccgatcaagaacaccgaactccatctccatatcaagcgtaacaagcggcgcgtccggcggattcagaattcggttcgtaccgttgagtgcgaaccgatgcccctcgtccttcgcctgccagatactccacgtccgatcgatcatactgtggtgcagcataaaagccgggtcttgtggagacgtgaacagatcttgcagggtggccccgaggctgaaatgcccgccgccgtgcacgcccagcaccccgcccggccgtgcgggccagtagtccatgacggtttggaaatcggaaatattgggcgcggccaggagtcggtcgacgatggtctcgttgtcgtagttgctgctgacgaaattgttcagacttcggttgaaacagtgcgggttgtaatcgaagcctggcgcgggaagtttggttaatgagacgatgttgcggtcgaatgggcccatgtgcacgatcatgtctttgaagggtccgcatcgcacgcagccaccgcccgatcctcggggtatggttattgagccgccggaaaggttttgttcgtcgggattgtgttccccgtcgcccgagagggagctgtcgctgcagtcgaagagcgggctggccttgaggttttccgaccataatggccaattccagtacctggttcgtgttattacaatttggggtcataatgaatgaatgacacttacggcagatatccagagtacccacactcgtctcgcagggctttctcccagagccagaggaagtgacggtgccacgggaggaacagaccactcagatggacattgagtgtgtaattgatatgggtgcttatggtatattagtactcggtctctagcatcgatgaagctggaacctacgccacaaaatcatcgaatcggttccgcacgcctgggtactcctctcttggaagatgctggggcttcccttgcaaacacaataccgcattggtatagtcgatccgctcagctcgctccaactctcccctatgtaatatcagtctcaattggccctgaaaacaccagaaaacacaaaccattccttccgctcagcaatattctgacttccacacaattgctccggcagggagatgtcgatatcgataccgaacagggaggactccgccgaaaccaaagtccccaagacaatgaccaagaaagacggatagaaaccaatcatcctgtcaatcccacaaaaatcccgatctgcgtttaaaattgtcgcaggatctccctgcccggtccatgaacaacactatttataagtaaccccccactatcgagccaataaatcctgctcgtaccccttgtatgatctgtaagtagatggaatatttaagattagcctctttcaatgaactgcaaaaatacttggctatgcggttccaggcctgtcagtgttgtgagctgtcactcggggccaatgtgcctacatcatacatgccccataagtggcgatgcacatcttcccctgcatgaaatgaagcgataggggctctagtcgttcactgcagaccctccccaaaacctagccagctcgctccaagccaattatcttacttgtttatgagatgctttatcgtcagatctatgttgtacctaggcgaactgtcagaatttggtgtgcatacttggcccccgtattctagcggtggggaagagagtgttctagtcggattttaaattagctgcgtttgttgttacgtgctggattatttctaacagaagaagtgcattgtttaacgaaataacaggtatagagaggaatggaaaggaaaggaatcgacagggccgtaagggagtttgtggggtccttctaagtaaacgatataaaactcgaacgctcgcttacattcccttacgcatcgggaaggtaggtttgtccactggacgtactagatatgacctactagacgctagatcgtggtataacccccgggcaaaagtatatttagtccctgaatgctagcttctcgttatccatatagtcgtctaattgtaagacccttaggtgcagttgcctaagtatacttagggataatggtggatcgggaaatagagatagaatatagggtggttgtatgtgaactaatagctgcctctccagagaagcagcctatggggataataccgcaccgacggaatcaactccaaagtatctatacggacgaccaagttgattggaaatcaacttggctcaaataacaactcatttcatacctctgaattacaaccggtctgtcgggcgaatcgccattccgaaattggtcagaatccaactggcgcctccctaacatcagtagtccgtggacccgtttcactaaacgaaaaccaaagccttgttgtggaaaaggttatgtgtgacatccttggctgtactagtaatcctcatgactcttctatgtggaaacagggtctgttttatgtaggtgaatgtggggtgggaaaaggccatatcattagagcgattatcgcagcgacggtcctggttcaccgcaaggaataagtcatccttatggcgcccacatgagcagtttctgatgccattgatggtagcacgtatcatgcctcactcggaattttgctcaaccgatacagacgtgatggggttagtccccgagttcgcagactatgggctcggaagacagtcatgatcacagacgtgatcagcatggtcgacctggccgcattgtctacacactgcaagactgttcgatccctggctagatcatcaaccgatcttgttgcaggactgccctgggatcgattttacggggtgatctacgatgagcagatgcgccaggaccaggacgtatcatacagagatttgctacggaggtccggtacgctgacgtgcgacgacttggcaacgcccaattccaaggccatttcttcgctctccgatccacaattccaaacatcaccggccatcgtcaaattgaattcgttgcggcatgtcatataaacgtcagaaaatcttcgtttttccagccctccacactcgaacaaaatcctcaggcccgaccgcccttcatctgcgagctgatgacttgcttggtttgcttaaggcgctaaggtcccatttcctgggtctattatatacactgcttccatgcctgatgttgatgtgccaaaagcggattggccggttcataagggaaaggtgggggatgtttgatgccaatatgacttatattgaatacaactggctaccaagttatcttgtgggctggtctttcactagagtccactctactggcctccgtcgctatacaccacattatctcgcggatttcttgaacctcttctcgatttttaccggtctcttaaatattcggtggcaataagacagctctagatttgaaagcctgccatttgcggctcattgcagcttttaccgatgatgtaatagctatcatcgtttcaagtaagtgatgaaccaatcttagccatgcaatggtagcgacacccactccaataatctggggatctgggaatctggggaaacatccatggctaagcaatctcgcatgttcggaaatgggttttatcctatacgaagtataatattgaacaccgttctcacaattgaatccatcacgatggaatgttccagccgcatcatcatgtcatatattgtgttcctccatacttctctcaaatcaagagaaaaaccaaagtaattctaccaaggaataccataggtagcgcgatgtcacgagcgaaaaaattgaatatatattcgtcaatccatcttctagccgtcctcgataggaattgagtaaaattgaacatctcccatcaattacacttcaaaaaatgttcttccaaagatcctcactacttgcgttcatttcactgcatctgggcttcattccaaggaccgccggtcaagtgcaggccaattgcctaagtcaacagatcttgaataatgatttgaataattgtatatgtgcggggggcaacaatgaatgccagaaacagtgtccagttggacctgttgcgccagttatgccagctccaaactgtgggagccatctactcggacacctgcacttggatgactgtgaacaccattgcttgacagaatcaaatgacttctgtaaatcctgttggatctggaacctacctctctgtctttgcttgcagaatggtggatgtctgcaaagctccaaaaacgcaccttactgggtcaaaatcacctcgacactagcgaccacgaatttagcaatcccggacattttgaacctgcaagaaaatcacaaactcctggctggatacgggtgggattttgggcaggagacggcatccgacccaaaaaccgagtcgctagttatcaactcagcctactcgatcacggagaatcaaattcacatgcacgtttgtaacattaataccaagatgcgcgactggttggctaccctctatcaatcctccccttcagcctatcaaacactggttgaaattccaccaccatatcctgctggagagaaaatgttctgccgcgcgtcgcaaaccgctgatcagactatcccgggggattcgatctccgatgatatcaactcagtcattcagcagcagcctgtttgcaagtactttgtgggtgcggccgtgatcagagattcgaagcactatacctgggtatgtgtgacggccgatcatcttagtgcggaatatggaagattctgtgcctgattttgctggaggcatctgtcaattgtcggagtatacggaccgacataccggaggattgtaatttagtttatgtagttaatcatggccccgtataaattgtgctaggcggccaatacagatatttttacacatacagcccagctgacagttatgagcccggttcgcactggacgagactagtattgattggtgtagtatctagcaccagctagaagtatctcgcgaagccgcaagccatacgaagctatatatatagctacccctatcgtctagtaatagactcggtatcgatcctctccgccataaaggaaaaactgaaggacgtacctcaatagcgtatctagttcgctaaagtataattgtatgtaacgcagaagaacgtctaggagctatgcaacctagacaccccgtcaatagatatcaaccacttcactttagcgaagaaactccggctttgttctagatagttgaggatttttgtgggtgacctggatatcttggggtcattgagggaactcgattgcgtattttcatattgggtttcgacgactgagtatgaaactctatgccaagcttgggttgatctcttgttttatagtgttgggtcgctcttgccttcccggctttatagctccttcctctctcagtctctcactctgcttttttgttttgtgtcgtgaaaccttgtcgtgtgcccttgatctaggtagtctagtatgtgagcgtgcgttatagataagccagctttaagcttttctttagacatgggatagagtagaaccactgcgaggaaaatggtctgcggaaccaacgaggaagatacatggagagcgtcatgaatacatatttaatattgacccaggtcctgcgaattcttgggcgaagcccttatgcacaaaacactaccatatgcacaaaacactaccatgatgctccgaaggctttttggaacaggtcataccccaagccatagcttcctgggctcacatcattgccaagtatcgcctcggaaaattgagtttgtgggtagacttcttgcttaggtcctgcccttctggctcttttcttacagccactgaatcctgcatatacccattctctacatcccatccataagaaacatcagttcccattgtgctggctattcagttcgcccatcaattgagcactctaatacattgcctatctctctgccgccgaagttggtatgaagccacttgtgactttctgggtgttcttggcttatgagcttgtgaattgaatacggcgacggttctcagtgggtatgatttcttttgccgcaagctggtcttggacgcgtcgcctgtgtcaagctctgttattattgggtcgggtagaaatgaatctggggatctcaaggccaatggtgaaccgtggatttgtcttgtgtacggggttgtggtcttgcgatggcccgagggatgttccatggttgttgcagcttggcaaggcggtgaacggggacagaataattacggtcgcagattctctcagctagcgagtttcaggtccaacccacttgaaatattctagaagctcacccttacgcaactgggaggtatggcgtcgggtctgggttgagtgttgacagctgaaaatggcaagaataccgaattaatgagacgatctgagctaaatatggccatatactcctgagatttgtcgtgatttgtcgatctggttgaggtcatgttagtacaatacacgatgtacagaaacaaggtgatgcgttgtacagggtaagagaaatagcatgtcatttgatatacggaatacgagtctggcattgttcaagcgagtgtctcaggtctatgtatagactgtttgaggcgagtggtcataccttggcttggtggcgtcgagacagacggttttagcgagtaaacaagtaaacagtcggattaatttgtgattggagtattctagaatccgagcgcgtttgatgttgacccctatgtagtttgacccccttagacccttttaatgacaatagcgttggaccccagacccctgaagagatcgacttgcctagatggagatgcgtcatgccaagctagggttatccaccaggatatatagtcggggtactactagtgagggtatgttgtgtaaatgggtatacgcgtctatataggagcattgataaatatagtcatacatacatgccagttcattgtctataatgttgtactcgtaagttggataggacctgacgatccaagaaacaaataaatagataatataaatgaaatatatcgaattggccaatcaaagccatgaatcgagggtcatccccactgttaatccaccgtcgacccttgctgatcggaacaaaacagcgaggatgtgcataggaccttggcatagcacagcccacgggtcttggcccaaaaccctttatcccttgctcttgctgtcttctcttctccttcctttcagatttcgtttctcagtctgtcattcactctcttttaatccgagcgcatctttctcccactctcgtttatccaatcgctcttttatttattctcacattatgaagtccacagtagcttccatggccacggccatcaccttgggtgcctcgaccgtccttggtgccgcaaccaacctccaggcccgtagcagtgatatcactccgatcactgtcaagggtaacgccttcttcaagggcagcgaccggttctacatgcgcggtgtcgactaccagcccggtggttcttccaacctgaccgatcctatcgctgatgccgatgggtgcaagcgtgacatcaagtacttcaaggaattgggcctgaacactatccgtgtctactccgtcgataattctcaggaccacgacgagtgcatgactgccctcgctgatgccggcatctacctcgttctcgatgtcaacacccccaagtactccatcaaccgtgccgagcctgagatgtcctacaacgatgtctatcttcagtacatcttcgccaccatcgagatgttcgccaagtacgacaacaccttggccttcttctctggtaacgaggtcatcaacgacggtccctcctccaaggctgctccctacgtcaaggctgtcacccgtgatatgcgcacttacctccgctctcgcaagctccgctccgtccctgtcggatactccgccgccgatgtcgacaccaaccgtctcgagatggccgagtacatgaactgcggtaccgacgacgagcgcagtgacttcttcgccttcaacgactactcctggtgtgacccctcttccttcaccacctccggctgggaccagaaggtgaagaacttcactggctacggacttcccctcttcctttccgagtacggctgcaacatcaacacccgcaagttcgaggaggtcaagtctctctactccaccgagatgactccggtctactctggcggtctggtctacgagtacaccgaggcgggcaacaagtacggcttggttactgtctctggtgactccgttactaccaactccgattacaaggctctcaagactgccttcgatggcaccaagaaccccactggcaacggcggctacaactccaccggtggtgcctccggttgccctaagatgcagaagcctaactgggacgtcgacactgatgctctccctgccatgccctcccctgccaagaagtacctgaccgcaggtgccggcaagggcgatggattcgccggcaagggcagccagaactccggcaccaagtccaccaccactgccacccagggctccggtgacgtcgctgctgccactagcggttccactacttctgctactagcaccagctccactggtgctgcccccagcctcaagcctttccagttcagcttcgcccccgctaccgtcggcctagtcactgtcgtgtcggctgtctttggcgctagcttcatccttctgtaatgctcctacctttatgaaggggcttcatacttttttcgattctccctgacttgtatcttttttaactggctttcatcttttaccccgtgatgatcatcgcttgggcttggcaaattggaggacggcgggttgctttccagttggtttattcagcccttggtatctagtgttcaatgaaacagagcttaactgctcatatattatcttgctagtaactgcgctagcaggaaatctcactaaaccgtaattccaatcaaacaccctcagcaagagcttgtctccgcgacttcgacagtggatcaaaatacgggatctctccaagcgaaacgacccgattaccctggcgcttcccattgtagtcactgtcctgtattagcatttcaactctgaccatataaaccaaagcagaaatagtcctactcacttggtagcagtatgataaaccgaccgactaaacacaccaacgtcagcatatcacccatcttcttcatgaagtaaatatcatacttatcccaaatagcaagatcattcctcccccatctaaaccgaacctgcaaatcatgattctcaaacagaagtcggttgactatatatcccaacgacacatattagcgaagtatccctcagcctgtatctagtcgaacttacacagtttcttcaagacctcgctctcgagctgcgtcacaccctcaatccagccatgctcgacctgctgtcccgcgccgaaaagactcttccagcctgtaaccgggttcgttcggatgagggggctgtttgtgttcaatgagttagtttttgcatgatcagtcttgggtgacggtcagaagataggcgagtagtgtcttactgcgtcgctttgaaatcaaaccctgtattctccggtgcgcccctatcaccttcgattaggtctatgccgtgttctttggcgattttgttgaatgcaggctgttttgttatcagtacatatacttaattgttgcacattttatccggtgaatgcagcgagtgagtgagtgcgggttacttggttacgtacctggtaatgcacgaccttcaactcttccgctaacttctggatacttggcgagagtcgatcgtacagctcataccccgatgcccagagggtatcgccgccggactggtcttcggggaggtctgttatctttagcagagcgtagtcggatgggacgcgttcgaatgttatgcttggatgatttttagcttatttccgcgttatgggtttgggttcagcactgcgttcagcactggggagtgagtaggagggaagcatactctgcatgccatccttggcttgcgaggcggccgttcagtggcttgtatctgtcgccgtatagtttgcggttgacctacggctgtcagatatagtgctttatgctgctaggtattcggaggggaagttacctcggaagaaatgacggaaatctcatcgtccaggtgaccattctcgtcgactgcgattcctcgcttgctatttgcgacggcgtggcggtggagctgtacataagcatatgtttttcaatagttgactagatctattgcgtgggatctgctcacctttgatgtactcggcttcccagttaactcgcccagcttctgaccgagaaccttttgctcctcggaggagatatcctggtcgcggaagaacacaacgccccgttcggagactatgtggtgttagtgtttggttcatttggtggatctttgttcagtataaaatatactataatagactcaccaaggatagccaaatcccggatcttcgcctcgtctttcagaatatcggtgagttgcacacgtgggaactcagtcccgataatgggtgtcgtgttgaagttctcgtactcattcaagcttcctgatgacttgagtggtgagcgaagaatactgggttgcggggtatcggtggccttggctttgatatctagatcctcggcatggtcctgtgtagtgattgctggcgacattgtgatgcgtgtgagtggtatatcgtgtattgatccaaaatgaattacgtcgtctattgttgaggagtattatgtgcggtttgacaagtatatctctcctcgtaagtcgtaagaaggttcgtctatgccgggctgtgatcttgcaccatcgcctctaaagtttcatcttcgaggcacggattggcctgtcttgtgatgacgacacagtgcttacagtttggacattgttttggtgggatggtgtcatctctatctcatgaagttggtcaattgagggttctccgtgtacatgtagcaatctgtgccgtatatggcgtataagagggtgatgaggagtaccaattgcaaaatcaggatttcatcgtataattactattgataggcttaacaatacgagttgttctgcgaattcggaggttacagacacatcgatagtccatattttgttctataaaaatataaataccgctctagctaagatattacctgtacaaactcgttgtatattcaatgcaatgcttagtcgaatgaataaacaaagcaaggatctgtgtaagtcaaggagtcattagggaatccatcagcccaacccaccgaaatcaagctgcttatgcagccgaggcaggaggagcaccagccggaacaatcggctcaatatcaaaccgcatatgcaggtcacgtctcaaaaaccaagtatggattctagtaatccgatgcgtacctataggccaagcccctagaacaagacaagccaccgccttgcccagctgcgttcccaggatctgctggaattcaggagtattcatatcccaagcatggattgttggtgtcagacctcttgtctcaggaccgggaagaccgttatttgggtagagcaccttccccactaagggaagggtctcatcattctcaacttctaccatgaaaacataccggagagtatcaatcgcggcgtcctgtttgtataaagctagcgcaacatcagaccatcgtggtccccactccattctaaaaatcgaggtggcaatgatagcacccttgacgatgcaatggtcgtaagaggacacatggtgtacttgttcatttctcgcattgcgctgtagagatgattggcggtatttcttcaatctcggattatttggaaggtaggtggatttaagactctctctaatctcgaccggtgggacaacgaacgaggattcccatacactgaataatggctcgtccgggggattggcttcgactagaccggcgacggttagtgtagactgggtcactgggcatgctgggccagctgggttggtgttggccatccaggcttcatattgagcacccgttgttcgatacttgtcgattttcgccatttcgggcgttggttgtaatatgtagatttggtctgggtttatattcgcggaaatattacccatgtacatgctaatattcccgggactcgtaggtaactcaggaaggcctgccctgagatcttgctcggcggtgttcactggtaacggattaagatgtgtcgatatgccctgtgattccctggtctttagcttggatcgaacttgtgcgagttttgattgcataggggagctacgttcggccggagccagtctgtcattatcgccgtcgtcactgtcgtcgtcacgtttccgctttttgtcctcagaggtgtcggcttcagtagacgcggtggcacccgctccaccttctggtactggcggtggtgcttcatcatcatttccaccgtcggtgttattacgacggaagaaattagcgactttcttgaatggcgaagagtgaaattcggacatcgtgttgaaaatgtcaaaatcagaaggatttggaagtcttcgggtttctgatcttgttagccaggagctgatatgcttgactggcttagctagatgctggactaagcaggtattatatagttcgaaacaaaaggtcattctaagagatgtcgagtcagtgtttacatccagtctatgttaagatgaaacagacggaacaatgaaaaagatctggagacaagaaggcttacacaagtgacttgataaagaacaaagagagccgagacagagcatgtgaatcaaatagatgggatatgaagtcctcgagtgtaagcgtatgatgcaatgagaatcacattatgcaaacaaagcagtgtctggtatgctaaatttagcttgaagccacgagtccttcaacgtgaaagaactcgatccgccaagttcaagtcctgaaatgaacatgttgagagtgatttcaatctcccaggaagcataaaacgtcacgaactcgcatgtatagattcatgataatatccaaaagtagatcagttgatggaggtattgagaaaatgaaagtccaaaagaattgactgatatctcgttagccctgaaggacttcacgtagtcacacatacaattaactgttagcaccccatcctgcggaaaatctccaatcccgcccagcctctccgatccctctcaccagacctacaacattatcaacaaacccagcttcaccgcgattgaccctctcccgacgctcggtctcggtatccgaactcgcagcacgaagattaatcagctgctgcgtactatatccctgcaagcgatccgcatccatcctcgttaaaatactaccgtccccacgccgctgggtccacgccgcctgcttaacagctggggcccagtactccgccagggtagattcatcgcgaccaaacgcgtagcacttggccagcggagagtcagaatcctctggtataagcgacgcattccagcgcgtgtggacgacttcatatctcttctccatgaagaagataaccggccaggtaataatccagagctggagaagcacgacaacccaccagacgaaacggtttgtgcggaggcggttgatccagtgcggggagtatattgtgacggagcgtcgactgatggagagaccgaagcttagggagccgcggtagttgagttcacggatgtgggaggagaggacgttctgcatggcgttggagtcgaagccggagacttcgcggtgcagtgtgaatctgtatagggaatcgagattagcagtgtattttgtgcgagtaggagcagagcatacgatttcacagaagcggggtcactgcagaagcgctcgcaccacatctgtaggtttctcgcatctggagagctgttgttctgctcgtcggcgttatctcggcctaggagggcatcgctgtccccggtgagactgatagcggcacgcgacttgggcggcttgtacgtgcgcgagcgcaggattcctccccgatacgccggtctgagatcctcatcgctgaggacttccacttctctccagtttgtgaccatgtatccgccctcccacccggtcagcatggtctcggccagatccagtctgaactggaagtctgtgactgtgttgcttttctctttcttttggtcattgctcgtttcggtgtgggtgccatggatggagagtagcggccgtggtggcagctttatttgtagacggaggacattgtacaactcatcgctgttgctcgagagcgctggttcgaggctgagcgagtccttgccgccggggagataataggccgagtcgattagccggagcggtcggatgctttgggggggctgtacaggctggacaggctgaaaatgttggacaggctggaccggggcgacaatgagttcggggtcatcggtatacggaggcggcgcgtcgtcgtccagagaatggagtgagtgcgacgatgacgcgtgttgaagacgacccatcacttcggtatttagagcgaagtaatcaaattaatgaaaatgatcaaagggaaaaatattttagagagaaaagaaagtaaaattgagaaagagaggggttttcaatgttagaggctctaagacctcgtattacacagcccagcaccagttgactgcctattctatttataccacctttcacctttcacttcatccaacataacacttgaaagatacaaatttcgggtccatctgttggcgatcatggcacaaaccaggacccctccagccataagtttgggaaatgtcgctgacaagatcgcacgtcggattaggagagacggtacagagaccattcgacatacgccatgatttgggactattcagagcatcgctgtgacagtcccgccactcccatttaccgttttgtagagtccaccagcgacatgaaacggctgtgttgttgaccacggtcgctaagttgctcgccgcgcggaacttcatgcagtcactatcctccaatttcttgttgtgaccttggaccaacacgtagctgccagtgcaaccaatcccatcgaacatcttcagtgaccatccgttggatacggtgacgataccattcacggtttgtgtggagacaggaacggttgtggttgtggaagtcttagttgtggaggttttggttcttgtagacttagtagacgtagccttggtagtacttgagcttgtggcggctatagaatcccgcatcttgctcgccacaatactgagctcattggctaccatatagagaccagcagtgccagtaacagtgacaacagaagccctagtagtagtgctagtaggagcggcagctgacatggatgtggtctcatgtagatatgtcaagggtacatctaccaagggtatatctgtcgtgaaaaaatatggatccttgttggaagttgtcgaggatacatctttaactgtcaatgatagagctttggtcgcaggtgcagctttagtctcagatgattttgacgtagctttagttgtagatgttttcacggatgtagcttcagttgcggatttagttttggttgtagttttcactgtagtcttcactgatgctgctttagcttcagatgtagttgatatggctttagttgcaggcacaggtggtaaggcagccgcagatacagatgagacacagaagtctgcaccggtaccacatttaccccttgtagaacactatagatatagtcagtctaggctgcgagatcaaatccgatattggtaaagctcacacattgaccggcaggacatggattcaaatagggaatgtcggtccacaacaacggacgttctgttccgggcacttggggaccacagactgcatcaccaattgcaactggcattgggggctcgccggcgctgagacaaacctggcctccctgctgcagatttttgcatccgtaccatgccgaggtatgggtgttccaagtctcgatattggcagtggtgatactgtacccctcggcaatcttcgtgcaggtatcgccagtgcggatagtataaacgtagcagtaagaaccactgttcggtggaaagagagtttctccgtccccacagcatacgggtttcccgtgagacaaagaggagcaaacagtagtcgggttgaaggaagtgaatgatgctaccgagatactacacttggcagccagattgtcgcatgtatctccagtttcgacaagaatagagcgacatgtgtagggatagtaaacggaccggtcttggatcactttgtactatcttgggttagaatctggggtacaggatgtggagttgaagaagtaggcactaacctcgggtacagctacagacaacgcaactatttcatgaatcagaagaagactgcatagagcgagaaagatccctttttgaaaataccccatcttgtgtagacttgcctgagaggacgactctgaggaacacatcgcgcagctatatatatatctataaagaactacaccacaaatgtcacgcctgaaagcaacatcgcggaggtaacgtgcattgatgcagccagtgaataatatgaaacacagatatgcttcatacagtaaggcgcaggggccaagagtccccgaagggccacttgaaatcactcattctggaggacaccatgttgaattgttgtaaagaacaatctaaagtgcctcctccgccaccgtcaacaaagaaggtcgttgcatccgatgagcccccggtaaaaatgtgacctcaaatagcctttgttcaaatccttctctttcctcttcggagtttggatagcagattctctttgaagaagcgatataacttaccatactgccaagagtcttggctaccagggtaatagatgcatcaaaaccaccagtttgtgggagttaatgacaacaaaacaaaggaaagactaaaagagagacagatagatgttacgacactttatatctcctttctcaatcagcctcaattctttttgctgtgggacaaaccatcaaaacgatagcgctcatccctgggaccagttcaacgccgtatatatattggatgaacatggttattagcgaggattcaaaagctgagtgccattatagtgcgtgtgaccgagtcatagaacgaatatccaggggttggaataacaagactggctaagggcttatcgtctttgtgccactcgtctttgtgccacaattcaagggttagggacagggtttcagaaatagcttcttagaattgagacatcctaactgggtagcattggaaatctggagatacccaagatggcgttttgggagtgatatagatattctccagagctattcctcattcaaaggctaactcttgacacgcccatacatcgacgtgcgaccagcagagatgggagtatatggctaggagcaaatctagacttccagatacagcatgtttgtcttagggtgacggaagtgagctcaactaaatattgcttgaagcccaaaaggacctcggcggttgatgcatatggatcctctaagataattctatctgtattcagacttgattccttttatagactcttgttagcttctttcttttaaatacctcttagccatcgagaaaatatgcactctctaggcgtggtttatataaaactcctaagcaataaatacttagagagacatgtacggcttagtgatgaattcaggtatgctctgatgtattgaatgtcttcatgcagtttggcaaacctctctttgcttgctgttttggcacctaagagctttgtgtctttgtactcacgaagctattaagaaagctcatggcagtgtctagatgatcatcaacattttatctcacatcattctctcctcttcagaaatgtagacagtatacgtgcatcacgtagaaaatgtatgtttaggaacagttgaatacacctggattgcagcgtctgacctatagcgcttcaaccaaacagatatctgcttcatgaacacactactcgatgcatccgagattgagcacactgatactgtagccccatgccctaagacaagctctagaagtgcaattatcagagcattcttattgaagcaaagtgccttgagcttcgacgacatcataggtatacacctaggcatataacctcattcctcgttttgttaatcatcgcgttaaacgtttaacgcgtttggttcctacttattttgatttcttttttcccctgcacctctccttgttcaatcttcacgtatctatttcccagctttgtatcattcatcctctgcttcatcaccacaatggcttctagccagaatgtcgctaacctggatgtcgctcacccggacgtcgctcacccggacgtcgctcagccagaagtcgatcatctaggcgtcgctcagcaggatgtagcgcacgaggacatctctcaccaggacgtcgctaagcatgtcgctcaccagagtgttgctcgccaggatgcctctgcctttaatcaggctccttttaaccaggctgcgtggcttactaccaaatcaggccgtcccctcaagatcggcatcgcgccattcacacctccgtctgcccatcaaatcattgtcaagaatggtgctgtggctgtcaataccgttgaatggaccaagaagttgatgggcaacatgatgtccccctgggtcaggtacccgtttgtactcggaaatgattgcgctggtgaagttgtgcaggtcggtgacatggtcagtcgcatcaaggttggtgatcgggttcttgcccacgccctctccatggatccagctgtcaacaaatcttctgaaggtgcttttcaaatctacactgtgatccgtgacaatatggtcacagtgattcccgattggctctcttatgaagaggcttgtgtcattcccctcggtctgtcaactgccgcgaccgctttgtttcaccgagacttcctatctctcaatctccctggtactcccccgggcactggcccagaatggcttcccgaagtggtcctggtctggggtggatcgaccagcgtcggttgcagcgccatccagctcgccgccgcggctggttacgaggttatcgccacttgctctcccaaaaactttgaatatgtcagtaatcttggcgcatgtgcggtctttgattatcgtgacaaggccaccatccagcaaatagttgagcttctcgagaacaagaaagttgtcggcgccatcgctgttggggacgactcaactgatgcttgcattgaagtcctcgcgaagacaaacggctcgaagttcgtggcccgggcctgcttcccgcccccgaaaagaattataagcacaaccttccagctattccgtgccgtggcagcctcggttcggtcgaacatcaagaccttcatcaaggcgaaacgcagtggtgtgaaaaccaagtttatctccggtacctctgcggctcataacgaggttggtgctatggtttatgaccacttcctccctggagctcttgccactggggtttttgttgctgctcccaagccgcgcattgtggggaaggggttgagccaaatccagcttgctatggattgccacatgaggggtgaggcagctcagaaggccgttgtctcgctttgaatttgtcgcgagccaatttcgggtgttgttcttgtttgctctcgcctgaaagggcactgcaggacctaggagactaggtattcaatagttgatgaaatcccaattcaatctaaacacaaagtgagtaaacttaaagatcaaggtcatatttgtagtgagaggaatatattctcaggagtacccgccttctgatcgatatgtaatatgaatggtacttgattcaaggacaccgcctacttgaatactacaatattacatctgtacgcatacaagattgaagaagataattgaaaacagaagtatccaaacgcctgcgagctctcgatatggcgagctaaaaaagattcatgtccaagaagaaaggtggctccggctggcctgtgacttcagacatagtacacccttgaacagtcgacaggttgcacaatttgtgaaacgagtcatagtccgagtcgagcagctccaagtaggtcgtagctaaattattcccaccctgcaaaactcgcaaagctttcttcaaatcctccaacttctgctgtttatcctccgacgcggagacacatgtactcggtcgatcggcatgtgtcttgaggaactttgccgagagatatagtagcatgggagaaaacgcatgcgcctgtacaaccttgtcagacacgaaagccactgtcaattcacggggagcaaagggagtggtctcactttgaaaaagctggatcgggtgagcggcttcgccaaacctactatctcatacgcggagtagagaggaaccaggatgatctcatcatcaatttccaccggcagggcctctattatattgtagaaccatatcacggcggcattggcgagcatatttgtgaagaggcgcatgggtcgtggagttcgggcgaggacgggggtagtgaaatcagcatcagccgctgctgtaccatttggtatagtcgagtatggtgtttccagctatctccatggcttggagacgtcttatcaccgtgcgcggctcgctggaatgcaacgctgtgccagcatagtgtgatcaggacgattgtctccgcgaaaggcggtagcattttgtgtccggaggcctcgatctcgtcatataaggagtccataatgactggcctgctgtgctggaagtctgactccgagacggggagatatatgcatagctggagatgttagtgtcactcagagcattctgtaaaaaggagtaattgctcactgcttcgtcatttagacttagaggccactcgtcagagatattgaggaaccggtcgagacaatatgctagccagaaggtccgtcgcttttcctcggcctcggcccaggcttcggggtgtgccatgtttatgctaatgttattgagacgatcaatctcgtgcaattttgcgagttggataatgcgaaaggcacgtcctgcagtaagccaggctcgacgatagctcatatagcgaaactcatagtgggtcagaagaagccatgcttgggctgcctgaagacaggccgcacctctagattcaatatcgtgatcaagggtctcaataccggaccgcgcacggctgtagagagactctcgcatgtgctgtaaatgggcagatgacgcagctgcaagtgcccacattgcaaattgcaagcagatgtgagaagctggtttgttgaatctctgtgaccaggagaagtaccggccctggtggagcattggcgcgacagggtgtactctgtcgaaatatagttgatcccttcactagctgttagaaatatccggacttgaagggtaagctttgcgtacagatctgcctcgattatatctgagctctcatggtcaggtggggtcattggtgtaataggtgaggttattgtcgatgtctcaatggagtagataatgtcacgacattcgtcttttgtggcattggggatatagtcctggggtgggctgagcatttgaattgtctcgtcggagtgatatttctcactgccatccaatacttcgttgggacagagattgccctgatcacaatttatgatgctttccagtgtagctaacgataaattagcagggaaggtgtataggtcacatttcaacacaccaatgcgattgcgcaaggccttcaaatgtcccttcttggggccccgtggggagcgaacctgattcacaaggcaggccgtaccagaatcctcgcactggtcacattgaggccgtcgtctattgcatcgaagtttctttttgcggcattcctcacaagcctaagttgtcagcgccaagagtcaccttatgagctaagtggctattgtctcaccagtccaggctgctgtcgtgagcctgacatattgaggagctgaatagagtgttgatgttctgatgttctgatactactgcgcctccagtaagaataagactacccgagtcaataacacaagtatatgtagtggatatttataactgtcaactaagactattgagtgcactccagcctgagtcgctcaagcgtcggcaattatagattaactatttgtttcgccagataccctcccctgtagaaagcttctttcacgatcttccaaatttggcaacttgtacttgtcgaaagtctactcctcttccccgatgaagtccgaagagaactcctacgtatggtgtgatcagcgctacatccgaaatggccccatactcatgacctcacgtctttcagctaatcaagatagtgcctgtcaagggtaaatggctaatgatctagatagctttgaataaacttccgtgcctgcgctgggtgcagcgttagtatttttatcacgccgcttgggtagcatagataagctggatggtggtagtaagtatcaaccagttaaccatgtttgtcgattgttgatcagaggttgaatgatctgtcatcctggtgttaggtctgttagccgaatcggttagttgctcaagattgaggttcggattgttaatctagtgtggcaggttgtgtggatatgccacgccgactggctgttacatatctcaaccgcggcacatgcagcacgtggacaatgatttggaattgataattcaaatcacgcctactacgcaacaagctggactagaggtaaagctggttctcggcctatttgagccaagagagtgtagcacgaaacagttgtgaaatgtacggggcattgattgtgtcattggctcgttcagaatatcttcttcaatctctgacgcaaaggtagtatggtatctagagtgtttggcggtttggatgtatctttcatggttgagataaggtcttggatgcaggtttccgtaataatctcattgactattggacagatataaagatcaattgacatgatgagaatctcggcccatgactgcctaagcgtatcagaaaatggcttgggttacagctagatcaggtagggctgaatatccggaaatctcacatcttgatctgctcctccgcgacgtgataacttgaacctgatcgaaagggtctcttgcagcaattctgatggaacctagtacttttccctcgcggctatggaaatagattgttgcgaccgagaacgtcaacacaccgtaacttcaagaaaaaagcttggatgtgacttaacctggtcgagtgatcatggtagcaataaatagatgcgcatggtacgcctttgccccacattataagttaactctctctcttattggtgaatattcccctgtgagagccacgcgaggctatcgcatacaccggggctacactaaccaaatacggtaggtacagcgtagatatactatcatctcattgtaatagttgattgctaattgatttctaaactaccatttgctcgggggaattaagcacaaaggcaatcaagccaagggttgtggcagcatccgctatctggacctgcgtcatcctactgccacctctaggactacgcggggcttatctcgtgcacttcagctcgttccggcacctattcacggcagtagatattgtgagattctagtgttgataggttctctatcgcctcgggccgaaaaggggttgtacgtatttggaattgttaaacggttatagtccttgaaccccatgtgacctgcggcgcgcggctctgctccccattgtgtacctcggcagtgatatggtgcttactcatcggtcattgttggaatctcgactagccagattcggtttctgcaggatctgtcgatatgcaatgtcgcagtagggtgtggctcggccaccccgttgcagcctcgagttcgggctaacggaatgtcccaggcggaacagaattgcattagatctcacaaattctaggcgtaaaatgcttcgtagcacgtgtgcctcgaaacccacgaacgaacacagtcatatcacgcttgatccagacggcaatagattctgtttatacagctgttcaaaatttcaatcccatccttaggcacaaaatgtggagtctaaacttgcccatactgggggcggataagaattcagataacctccgatgatcaacggttctagcctgttagcgtcgggacgggccggactgtgggtaagtccgcggagttaccaaactggaacggggtactccggtttccgtaccgagctgtataagctttccataatacaaggcgaaaacgggtaactctattactactatatctcaaacaggcaagaagggactggcaggaaggaactggcaaggcactgccccaaggcaagagcattcctgggttcctgtctgaggaaggaacgatattgaagaacatctaaatcaatcgccaccaataaaacagcatggttggtcgcgcgccgggcgctaatccctgatatggctccagcaccaaaaaacgccacgatctagtactagttcatggtccaccctagtggcttcaaccttatcgagcaattttatacctgggtcgcttcatactgattaatctatgactggtaagatcgaaataatttctcggcctcagttatctattgtccttactactctcggcgttacttctaagggtatgaaatcatgccatattatttgtcttagtcaattaggaacacaagagtcgtatatgggctccttgggctattgcgtgtccaatgcccgagttagattttcaggccgttgccggaatcccaatggttttgcaacagcctatctttctgcgcgactctgttaggatctacaagggacaatccggtttgattcaagtggcgagtggcggcgttggacagacataaattatttggcctcaacttttcggggttgcctttgatcaagctgcaacaatccggggcaatagcgcctgtgtgaatttccaaagaacccctccattgtgagagatcaatgcagcgccggtgtaccaagtgctacgttttccctgcaacgcatacaggtcattgtagaaaccgtcgcggatagcctgagccgacacacttagcttgaatggcgtgtgagagttgagattgatgatttggggagttgtaatcgtaacgttctgtgcttcctgcaggttctgaatggctcgaatagtcgcttgctcgactgccaaccgcgtcatatgtgacgggctgcggtaccagacgtagaacactcccggaatgcggatgcttgtaatttgggaagctccaggttgctgaggaatatggtacgttgcagatgagttgttctcattgatccactggtacccttcgggcaaaccagtgttattgggtagtagggtatagtagcccatataggttcactgcgagaacatctgaagctcctgtagattgaaattgaatggcctcatattttctaaagttgggggaatgttgactaaaagcttagatgcttggacgagcttgaatcccgtggtcgtcttgacgacgagtgagacgcctcgccctgtttgtggtcttgcagcagctgtaacggttgaggagatgagagcatctgaacccagctcagcaagagacttgacatatagctcagagttgtttttatctgcggcgttgagcctagcacctgctatttctctcaagtatgcagcgtccaccatcttcatcacgttgactgttaactgctgtagtggatttgaaattccctgggagctgaaataaatattaaaagcagcatccgagatgttatatttgacaaggaagtcccccaatggtaggagcaggtctggaggaacaggctgagggatttcccaggtagagtccagccaagggtactgcgcgacctgaatggcccatccggtcaggtttcgactggggttgaatagcacagggtttcctgtattaaaatctgtcagcgagatagtggcattagattcggtatatttgacaagggagatgttgaagtgggcaaaatagtcaagcgcgatagagctgttcaggaacgattgcaccccatagtccacagtgagaccggtagctttatcagtgtaggtgtttgtgtggccacccaggtgcttctttctttccacaaccactacgctctggcccatcttgcgcaggttgatggcggcatatgttcccgaggatccccctccaaccacggcaacatcgcagactaggacatctgctttggcataatttttgggatcgaatgtattgccggtgattgccacggctagccaaaatgtgaccacggaaggaagtcttgacagaaacatgattcgggagacagcttgatgtattcggttgaggttttgttttaatcccttggtatttgaacacttatggcgcgatatgtgttaacacacagccctttcaattcatatttctaccgccaggaggtgttagtcagtaaatgcaatccaggaagtttccgtccatccagtggcgactgctgtagaatctgcactaaggtattagtgtcactcacgcttccagatggggtatatctcactaagttcgttgttcaacaagacccagttcgtctattttattagtttcttgcggttcaagagtctagtttcttgaaactcccacttcttcagtgttatctgtcggcgacaaccattgcaagaaatagcacttctatcctccctcaggtttcttgtatccgaacatccgacaacataccgacctagggatgtagcggaaagtggggccgtcaaataagcgttcgggtgtgggttgatcgtctgcaggtggtgtggatccgcacataaacagttgtcaagagtagaatagtttcgatggtgatattcaatgtgagggagtcgagcataggtagggaaggagcggagttctgctttggggaagctactatcggttttgacaaatgtcgtccacaaaccccaacacctaagaaagtcgcgctggaccccaaactcccaaccttccaagcaaccaccccaattattccctaccagcacaactacaccaacatcaaaccccgaagcaagatgaagctcatcctagctggcgcgaccggtctcctgggcactgagatcataaaacaaagcttgcaaatccgcgagatcactcaggtcgtcgcgttggcccaccagcccgtgcagctcgacaaaagcatcgactcatcgaagttgaagattatcgtcctttgcgactatggtgattatcctgaggacgtgaaggctgagtttgctaacgccgacgcgtgtatctggtatgtctcgggcagcaccttcattgcctaattcaaactgaccacaacaatttgtgcgtactaccggtagggctgtctccgtcacacccttacgtaccagcaaagccgagctcaatcgtgtattccatgattgcaccaagcttgggtttgaggccatgtacgaggctggaccggcacgtccctttcgtttcatgtacttgagtgcggatggaatatttcgagacccgacaaagaaggcagtcatcatggcagattaccacatgatacgagtaatggattcgaatcccagagctccgtgattctagaacttacgctaatgtcgtgcttttggtgagctagtgcaatgcagagctcatggtcctcaaattcccaaccgagaacgaaggagttgaagtttgcatcgctcgtcccggcgtgattgctaatccctcgacatggtcgagagctttggtggccaaccttttccgtatcgtcggttttttcggacggtcccttccgaatatacaacgcagcgagcttgcagcggcggtgttgaaccaggtcatggatggattcgagaaggaagctctcttgaatgccgatctcgttcgcattggacaaagggagctgaaattcagcagtatgccttatcgatgctgaagatagaaaaggaagttgagtgccaggtttgaggggttctcctcaaactgaaaatttggcattgtctctgttttctttgatttggaatgtcactatgctcctactgagaaaggggcgttggtggcaatccacacgataaatcctttttttatcatacccgaccacaaaccaattgagtccaagttgcaaagtctctaatcgaagcgaattattccgcgatccatcacttttcgtacacagacatacctagaacaaacacatagacgtattttcctaggtgatagtggccaattcctgatccagtggcattgaggcaaatttccatatattatctctcaagttaggtgattttgacagtactagcctttgtagtgcgaggtttcaaacatggactacggacagtccttttgatctattagacctactagtacgaccacattataacgccaaccgatgaataaatttgcagtccagacaacttccctcccccacggagcggcaaattccatgtgggcgactccgcaaaatgtcatgaatggtcataatgacgatgcagaatccccccagcctataactaaggccccatctccaagcaccgacaaatctcccaacagacgctcgataattcccacattgaaaatggtcactcccaacgatgctcaagccctgaacctggaggcacgggaacaagaggatgagacctcggatatgaaagatcctgttgatgccggttcctctgacatggacgaggaaatgagtaagtagcttcccttgaacaattccgactttatcatctccagacctgctaacacaaatcccagtccaggactataggacgcttatagataagaccaacctcgtggacaaagaccgtgttcaaagcgcaaaggctagggtatccaaggcctaccatcaaccgaacgaggaggcaagtgatatttcttggcggcctgatccgtcgggtcatccgcggaggactttctaggtcgttgtataggagtatagttgattccttctcagagaatgaatgtcatattttcattcgctttgtgcacgccagtattgcccacggagcataggcagttggcagtaggatattcgggagtctccataacctctaccatgtgagattgaaaactacgctagttttagaacccttaattctagtaaaaaaagttagacactctgcatatcattgggagaatggtttagtggccaagtagacgttaaatcctactggtcaagatatgccgaccccggattccgagctaggtcatcatgcagctaaaagttaagatgtggcctgcataacgggagatctacacgatctagccacgcgggcctagccaggatgcaaaccttgaaagtttaaggcggcaacacgggccttctacgcgacatcaatgtgttggaaggaagcggaagagataaataaatcgtgtaaacgtgaaaaatcaagtaaatgctatatgtacaagagtcatgtcgaacgccgtcccaatttgtgcaaccggtttccacccgctcaaagctttccctgtgcctccttggccgccttggcgtgacgctcgaaagaggacacggggggagcggagttggggttggggtggtgcttcttgagcgccatgcggacattgtactccaagtcgagagaggccttggggtcattggtcttgggcttgaagtctacgacgagatcatccttgacagcgaagacggagtcgatggcgagatgagggtcgtcgctcgggtagatctggttgatgacggtggcgtagtcggggtgggtaatcatgaggtggatgtgggcgggacgcatgggcgaacggtccatgaggttgaggaggacaccggcggggccgtcggtgggcagggagtaaggagtggggtggtagcagtaccagttgaattctcccttctcatttgatcggaacttgccgcggaggttgttatcggtctgggtggggtcctggaaatcgtattggccgttggccgaggcttgccagatgtcgaggacagcgccgacgatcggcttgccggtctccatatcggtaatggcaccgtgcataaaagtgacacggccattaggcttgggatcctggatgatgctgtcgccgagagcgcggaagggggcgttgggagaccagaaggggccgagaatgacgttggatgtaggggagagaccgtcctcggtgatgatcttgttggcgatctcatcgacgagactgatttgaacagttagctttagcttttctttttttcgcttttgttttctttttttttattagaagcagatgtgaaacttacgactcaaggccgatcacgtcacaaatacggtggccttcgttgcggataggagtgctgatctggccgatagagttgataaactcaacgccgagcatccactcggcggaggtcaactcaacctcacgagcaaagtcgtggatgtgcttgataagagaacccaagaccacgcgagcacgctcgggggtattggggcccatgccattgatgacagagggggtgaagttggggtcgaactggcgtgtggaagacattttatattattggagagagctgtaaaagtcaaggaagtcagggcggcctttccaggtctatatacacgataggcgacggcatattgttcggctggtcgtggatgtggggaagtcgcaacggttccaaacccgcaaaaatcccgttgtcacctgccgaatgtcgcgatcgcgttcatccacgatggttccgttctggcatcggtcagtcctcaacagccgaggggcggctggtctcctattatatcagcgcggggtggccggggtagctcttatccgcgggtaagccccggcacctgctttcaccgccttttgattggttcggcttttggtcttcctcacgtgccgacttgccgatgtctggagtttacggagttgatatgcaatgagagggcaataatacagattctattggtatagatctaattcagctatgggtcaaatcttcattaatactgaatttctaccaaatcgctcacctcgtaatgtcctacatcaaaatccccacagtctacctgctgattgatcttccttaataatgcctgcaaaccctcgcggtcttcgtcgtcacattgtggccaatcctccctatcttccccccccctcgccttgggtcaagaaactgagaaggaactgtaccgctatcaaactccatgtaccggtcacacatcaatgccggcctaaggtccagttctttctcaaaaggcaactcattgtacgctgaatcccatgcttcattgtgaccaattgcaaagcgacagagatatggaagacctgtttcaaatgaggcaaaatattcattccaccggcgtggataatgatagtaccagtcctcgcccctcctgtgcttgctagtttgccatttcattctggatatcagtactgggcaatcgtcaatgtagtattcgacgttcgataatctcacttggaataaaatcgtacaatcgtcaaggtagagttcatggagtgttgacgagtgcgagagaatccaatcaacctgctggtcttcgaaaaaggagaagtttcccagagtgagcgattgcaaattgggaaagtgaaccccttcgaggctgaatttaggataaaatccccagtaaaggtcggagtatagagacagcttccggagtgatcccatcgtgggtttcagccagactaatgacaatgtatgtgcgtagaactcacgcacttcctgtttctgttatatctcgccgaattagtataaaatattatactcagcatatgttgaagatgtagactggcttgtgttactatgtacctcgagttcttcttcagtacacgcagggtcgcattcatgcacaacattcagtctcaacgaacttagcgtactcagtacttgctgtaaatcttcgctcagtggtgtcacgttctgctgatgctgaatccccagttctttcaacggtcgctttaaagacactagccccgtacccagccattctaagatggtttctcggtattccagtgactggggtggataaaaccaaccgcctcgcccatcgcggtttatttgtcgaagcgcagaacaacgcttttgagattcggaatatttggaagcataagtaggagctccttccatttgacaggtagttcaagctcatcgttatctgtgtcggggtcctaatgtgttgcgtattagctacccattgactgcatgacagtgcatatctcacgcacggatataaactccacagtattgaggcggatcttgtgcacgtattctttcaactgcggatgtgttatgatggactcgaaagcctcacaacttatatcctccgcaaacagtgaggctgtggagaacagattcttcgttgcagaggcgcataacatgtggtttgtcagcctcagggccttgagcgtttccgtgtctgacagagacgtgatgatcgcaagtagctctgagggaagggtgaataaggccatattcttgcagtggaagatatgattaccgatcagaaaaggaggtatcagaccttcttatagaacatctggtccgatatgctagacccaatgtgactttcttggcgctgttttctaggcatccttagacagaagggtggcggttagcttgtgtcgacggaaaatcccgatctagctactgatcgctctttgtcctttttattctttcaatcttcgtgaaactccgcacaacccctaaaagtttttatcttatctacacgggttagctcccgaggtcacctgggcaactttctccgtaacgcgatactcatactactgcgagttcataggattactgtactcttcctgacgaaaatatcagcacagacatgatccgtacgttaggcaaattataaggctaaattcattaaaggatttccagttcatgttcaaagatcataggctatccacaagaaaccaatgcaataatcaccaagctaaaacctctttctgagctccacaggccagggccgcacagatctgctcatccttctcgctgacatctgcattgcatgacactttcggtttcgccggccagatctcccggcccgcggatttctcacgctcaaagtgctccgtgatgacatcgcggactgtgctctggaagaacagcggggccttctcgtacttagggtgaagctcgccgctcgtaaagacattccggtcgaggttcttctgtgcgttgttgcagaggactttgtcttctcccatgacgcgcgcgtacatctcactgataagcttgaagtctgtctcagaggagttccggttccggtagatctcgtagtccatcttggagtttttcgggcttgaggggaggaatttctgtatcatgatgaagtgcggcctgtatgtacatgttagacgatgtactattggagaaagcacaaactggaaacacttacgagacaaccatggcagacatggggaagtagtaagtactggccgtgtaaaggcccttctcgatttgctctggtgtagattcgcagtggtgttggatatgtccatctttgagatcactgtcgaaagattccaggttaaggaactcaggaatatcggcgtgtgttgtagggcagtggtaacattcgttgaagttatccgccagaatcttccagttatagtcgccctcgagcgcataagtgtgatcgagatcgtagtcatcgaagttataggctttgtagcgttcttgcttgtcgacgtctcggaaatggtcttcccatgacacttccgggacttcattcgcatccatgttgacccagatgaagccgttgacgtcgaccttcagatggattctgaagagaccgttctgctccttatcgaagttgctcagctcttggtatttcgtagccttggcgagtttgccattcagtccgtaggaccagccgtggtatcggcaagcgaggatttgcgagttcccagatccctctttctcaacgaccgggtacgcacggtgtctgcacacgttgtggaatgcgttgatgttaccctgtcggtcgcgagtgatgatgaagtcgaagcctgcaagctcgtagcggagccagtctccggtgttcttcaaccgcatgctgtgggtgatgaagagccatctcttcgagaatatggctcggcgctctagttcgtacatctctggtgaagtgtaccatgatgcaggcaaggcacgaacggctgaagcttttgtttcttccttgggggcagtggcattgaagccgaaatagttgaacattgaagccatgattaagtaataagaaggtacagtggagagtgtcttccagtcttttttgctttaatggtaatcatatcgatccctttatacgctccagaacaatttgatgttagactgatagccacgtctatacagcgatcatatgaacgatctggttccaatttggtaggacaacccgtcgcgaggcgggttgatcttccaagaacagacatcgaacccgccaacccgccaacccgccaacatagtactacaatccgtactacaagccgggagacttgacactattgttgattattgggtcaaatgttatcaaacccgacatatgcttgggcagccattctctagttctacgctgcagctaggccggcatactacctgtttatctcgagtccatagataatgtagccggaaatacttcgtatcacctacaggcagtttgccaaatattcgttcattgttattgtaaaagagagaagcttaacagataacatataccaagtcaacaagcacaacagaagtctcccctcgtgttacaatgtgcatataccggattaccccactaacctacctagttgaggtaggagacatctcatacattggaattttgcaattatccttcttaaataataaaaacaggctcttcgggtttgatacactccagcagaggcaatcaagcggcttcatctgtggtgctcccactttacatctcaccttgcatccacactcccgccggccgatatcacctcccatcgccgaccaacccctcagaatttaaatcaaaggacctctgatcgccatagaaaggctgctgccagatatcccatggcgtctagattctcgagatcgagtattcccacagtcagcaggcccagagctagcacggttaacctatcaaaccatatacggacgggatattcatccagaagtccctggtgatctagtggtgcagggtgagtacctgggctggatgccaaaaaagcgcccggaagagtaagtctctatcaatctctaggtcctagtggaagtaaccggctctgatattccctcctgctgatccgactaggctgattgactattatggtgccacatttgaccatctcgtcccggctggggatatcaaccctgaggtgttacagattaacattattgagattgaggatgatggtggtgtttatgcgaatacatggctttcgtttgcggtagatccgactgagtttattgggaagagggtactggcagtgccgagatgttgccagaagagaaaggggactcaggatcgctggcgggtgaatgcaatgggggactagagggttcatgggtgggaactgttgatgggaggatttagttaaaggtctggagaaggatcaaaaatcgggcggaggttgagaacttgaattgatatacatgcgctgaattctcttctaacatgattaatacgggtgatgccaaacactggacatgttttgtcttcattgaatagtagtctttctcgttgtttttctctgttttcaagaggaatttggtcgtattcgtataacatcgtcattggagaaaagtaaattgcttccgagggccagcagacacaatgtacgttttccttcggataatgccacgttgaatcttcatccagcatcaagagtcttacttctttgcatcatgcaattcacctcgctctttcactagattcgaaatcgcaacgctggcatcatcccccaacttcgcgaatccctgaatcacaccctcacgatccccaggacgcatttcctggctcatcttgaacttcccctgaagcttggtgatccgaatctcaattccaacaatgtttttcttcaggagatcagtgtacgacgtaggcgcatcagatacctcccacggctccggtttatcaccaccagtataccccatcgacctctccgaatgctgcgacagatcatgcagctgcttggcgagaaatgcgccagtctcgggtgttttggaatcatagtatagcgacatcttgccgtacgcctggacggcggagtaattccatgtaggcacaaccctcccggtatctggctttgtctcgacgtagaatttcggagtcacgtagtgctcgtatttgccattgaagagcactaggacgtcgtcgtcgagttcgagaacgttcggtggcttgtcatccacggcctccatcattgacttgacttgtggattctgcttggcgatgtgggcgcggagataggcgtctgtcttgcctgtttcctcggggaaatccaccacgaatggggcatgggtgcactgtaggaagtcttgctgggaggagttcatgccggtgatcaagaccccgagtgggttatgccggatgaaatggagcaaggcctctttgtccttctcctcgtgggcgctttggaagaacatgttgaatagtagctgggaggttcagaggatggggttggaagacaaagaggcgtgaagacaattgtgtagggacaaaagacccccaaaatgtcacattgtcggatcgttgatttgttatcaatggccaaggattcgtccactaaaggcatgtgcaaccggctgcagagacccagcggggcgggaaggcgcagggactttggcatttccccaccggattatcgaattcccgagacaaggcgaggagatcacataaaagttggaatccatcattgacaaggtcagacttgagatttatattgcgctccaaagaaaagcagtgttgtcctgggggatggtagcagtctatcatcgttcatatacaccagattgggtatagcgcaatctagcagaaatatgaagggctgccattggtcgtctccagtaggatccacttttgtctacgacacaaatccacacacaacttgatatacggcttgagacactaccaccagaccccggtataaacggggcgcgagtttataataaaaccatccattcgatatataagatagggggatagaaagagggtataggttgaacgcaataaaccgtgaaaaaaccagcatagaagccacacaaggggaactagaaccaagactccatcgctccaaaacaaaagccacctgcgtaaaccctcaagatacgccgatttttgagtaccagcaggtcacaagaccccgcatataacaatcgaatcccaatgactatctgtcaatgagatcagagtagaatatcaatcaaacagagaaagatgaggatagtctggcatgcgggtcatcgttcagaaaaccaacgcagctcgatattgcatcgtaatgtgttgacataatcttcgtcattcctcatggaacattacattgcgagactggctgagcctgcagccgcagatccccagcgcagttttcgcagcccgccgcggaccgcttcctggccacaccccactgaggggcgaggggtagaaacaccatctcccaccattccgagctcggctcgcccaacctcacggccaatcatataccccgcggaaaaactgattgcggagaatagaacgacaacacccgcgctgatgacccatgtcatgaccgtggggctcatggccgttgttggatccgtcatactcacgcgacgactctttttcgaggcaacaccgcggtctttgggagaacttgaacgacgctttgctttggaggcagagtcagctgataccgccggtgctcttacgcgtctctgtggtactcctatagacgggcttgattctggatagcgcggcgaggatgggctctcttcgtcgctgctatcatctcccatggcaactgatgggccgactagtcggaatgaagcaggttgtccgcttccagggggagccgccggggtatctgatggtcgactatcattcttcggaaggcctctggcggcagccgcacacgaaagaagtgtggatagactggcacgaagggcggcatcgtggtcggcatgatgggaaggggagatcatgttgtaagggctgtgctgatatggagatctccgcgatgaccgtgggttggggtaggattctcttcgaggaacggtacggcgagtagaggcagacgggacactagattgtggacgccgtgcagaccatccaggctccgacgtcgctggcgggtgtgtgaatatgtttggttgaggtacgaaaggtgatgtgttgattcccatccctagggcagtagaactatcatcttcatcatcgctggaggcagcatctgaacctgagaaaaggggtacagagtgcgcggataatgcagttcgcagccttgggcgggtcatatcttcatttgagctgctgagaacatgatcagactcgctttcgctctcctcatattcctcttgactgctactggtttggctggcatcctgcgacgcataggccgcctgggcagtggtaatagcggcaagatgttgcagatggcgtcggcgactgcggcgctgatatgcgcccgcgcctctttgctcgacccgtaatccggttgtaattatatcttcatttgtggcagcagaggaaatggaggaagaggagggttgggaggacacgtcgatccaagaatctatgtagtatcgtagtgagtacattatggagatctgggagcgattttgtatgcatattgaaatttcaccggaaagggggtaccggtcgcattataactacataccctctgatctcatgggcgccgcacccgatggctgaggctgaccgttatctcgaagcggctgatggccatcgcgcgtcatccgacttgcggctctagactcacgcgcctgacctagtaggtcgcagtgatttggttgcatattgagggttggaggaatatgggaggatatgggcggagacgaacaaaaatatagaaaagagggggtcaggccaccctggaatggagcacaagagagcggtcaacgtggggcgggagagattatcttatcaaatgtggagtcgatcgatcgatgcccgacacaatgtatactcctttctgctaacaaaaagcaggagatgaaaggggttgaaagggatcaagatgattatgtttctctgtaggacagaatgaaaagagacaaaagaaagatgaagagacccaggtggaaagaatcgaactgatgaggtgatcagcggaccgaacaggtgatttgcagctcgtgacaaggggcgaaagacgatgcgaggggttgtcagaggtaaagggcgggtgttgcggttcttattgtagattttgagatcagaccttctttcatcaataatccgatcaaagaaccttggagccttggaatgagttgtaggcaacacaaagaatagtctgggcaaggcggcaaggcggttactagtggcaatatacttacaacacgaagaatgaaaaggagcaaagttgatcaaaatgaaaatgaaatgatgtatcaaattaaagatacctgagctaaggtcatattacacataattaagcacgaacttttttctctcaaagaagacctgagacccatgggacaccgatatgatgcggaaatcaaacgtttaaaggaaggcacctcaagttcagaaagtgaccttggtacccttgaactcagggatgctgcccttgcccttgttgaggccaccacggccgccacggtcgccgaagccaccacggccaccgccgcgaccaccaccaccacgtccaccgaaaccaccgccgccgccgcggccaccgaagccaccacggccaccaccacgaccaccaccacggccgccgaagccaccacggtcaccaccggcaggacggggagtagagaagtcaagacggatagcacggccctcgagctcgtggccgttgagagcagcgtgggcagccttggcctcatcaatggaagcgaactgaacgtaaccgaagcccttggggcgtccagtctcctgctcagtggggagacggattccgagaacggagccctgggcgccgaagacctcgtggagagcatcctcagtagcgctgaaaggaaggttaccaacgaaaagagtgtcgctctcggggctggtggtgtcaccgtatgagcgagcacgatcctgggaacggtcggcaccctgctgggggttggcctggcggggagcggcgtagtcgaggttgatggtacgaccatcaagatcggtacccttcttggcctccatggccttagcagcatcggcggcgttggtgtactcaacgtagccgaagccacgcgagcggccagtctcacggtcggtaacaatgcggacaccggaaagctcaccgaactcggagaactcacgctggagccactcctcgtcgacgttccaggacaggttaccaatgaacaggttggcgacggcaccctcggggacatcctcggtcttggacttcttggcagtggcgtcaggctcggcatcagccttgcgcttcttggagacaggggtctcctcggagtcagaatcagagctgtcagagtcggaaccagactcggagtcagaagaggccttcttggcctcagactcagactcagattcagagtcggaagagtcagaagactcagccttcttctcagccttcttgggggcgggcttctcatcctcggactcggaagagtcagagtcagagtcggaagagtcagaagactcagccttagcagcaaccttcttctcgaccttcttgggggcaggtttctcctcttcggactcggaagagtcagagtcagagtcggaagagtcagaagactcagccttagcagcgaccttcttctcaaccttcttctcagtcttcttgggagcgggcttctcctcctcagactcggactcggagctggagctggaggaagcatccttcatatcctcatcagactcggactcggactcagactcggaggagctgggagtaggctccttcttcttgttggtcttcttggacttctccttggagatgaccttgctggcaacggccttgctcttggcggcgggggactgggaagccttggtgacaccggcatccttgaccttgttcaaggccttgctggccttaccggccttgccggccttatcggcacccttggtagatgtcttggacatattgaactagaggaaaaatcaatgttagccaatgctcttcgatcaaatggaggggactcaggaagagggcttggaggctggcttgtagcttgggtagggtggcacatactttagtgacaagtgaaattcttgtagtatgtgcggcaaagcccacgatccctcaaagcacccgtgttttggatgtgtaaaatggaacaacagccctcagaagaactgccagaagtgaactaaatcacagctggacgttaacccactacccacggacggacaagttttcaagcccacaagcaaccgacagctgatactgtctagaatatgtaacccacgaggaagatgtcccacagagcccacagaatagatgtatgtcaagcccacagccctcagagtgataagaagccctcagagtatccaaacgaacttacgagatagaacccacgcgactgcgttagttagtgtgtagaggtctcttgggtagtcaagagatgggataagtaaagcgacctgagacggactgcttattgaacgggggatgagaaaagaagtagggaggatggaaagaggaagagaaaaaagtgtgaagagctggggaccatcagctctgataaggaaaaatttttgaaaaaaaaattcggaggctggcagaaccactccgcctgcctaaagaggctagcgcaggcactcggtcccaacactatgtgggtaccttgccagtggctgtcgacgactcacaatcgcgtgttcacttggcggtgccttttgcttttgtctacgtcgtgtacctgctacgtcaattcttctgctatcactatactcgtccaggcaccgttcgacttttttttagctcgatagtcaatgggacgataagtttccattggcctttaacgtgatggcccctccgacaccctcctcgcaccgccctcgcaagaagagaaaggttgcgatctcccccggctcaaacaataacctgatcttggatctaggcgatgggaagcaatctccagcatttccactagtctcatttttgtgggctgctcgggccggtgtgtctcaatggctgattctcccacttgtcctcatggccgttggcctgttccgatgggctgtgagcttatggggttactctggtatgcgacattgtctcttcggaggtcggtacatattttaatatcttctagggttccaagttcccccgatgcacggtgatttcgaggcgcaacggcactggatggaaattaccacacatctgcctttggcaaagtggtacacatacgatctgcaatactggggtctcgattatccaccattgaccgcatatcacagctggctactcggaaagatgtacatttccctacctgccatgcattgtggaatttccaggcctcctgctgacccgtcgacctctctagtggctctgccttcgatccagcctggttcgccctggacgcctcgcgaggtttcgaggacccccgtttgaaagtttacatgcgcgccaccgtcgtggtgtctgaatacttggtgttcatcccggccgtggttaatttccttcgccgctacactcggatgcagggtgttcatgcttggtccgcctcaattgctctcgtagcagtcctccttcagccagcgaacatcctcatcgaccatggccatttccaatataatacagttatgctgggattggtggttgcaagcttggacgctatcttggcggggcgtatgctctgggcttgcattttcttcgttggtgcactgggattcaagcagatggcgttgtactatgcaccagtcatgtttgcctatcttcttggtgtctgcacattccctcggattaatattccccgtcttgtgagcatagccctcataacattggctagttttgctttgctgttggcgcctcttttggttggtgcctccaatgccgaagctcgaaaggcatttgcatcttctccggtgccgccgatgttgcaggcacttcctatccacatggacaagaatgctgttgcatatgggctattgttccaactaacgcagatcattcaccgggtgttcccctttgcgcgtgggctcttcgaagacaaagttgccaacgcttggtgcgccattcacactttttacaagctcacccgctttgacactacattgttgcagcgagcatcgctcggtgccacattggcgtcaatcatcgttccatgtgctatcatcttccgccaccctcgggcctcgcttctccttccagctctatctgccgtctcctggggatttttcttgttctctttccaggtccatgagaagagtgtgctgctgcctctgctaccgatgaccctgctgcttgctggtaacggtggactgagcaaagaaacacgcgcctgggtgggctgggccaacgtgcttggctcatggaccatgtaccccctccttaagcgggatgagctccgcgttccttacatagtcatgactctgctctgggcctatcttcttggcttgcctcctacttctttcgaaacctatcgaagtcggccatcccaggaagattccaatgcccaattcgaacctagcattctcacaactcttctacacttctctttctatttggccatgattgcctggcatatcctggaggcatttgtggccccgccgcctggaaagccagatctttgggttgtcttgaatgccttgatcggagctggtgggttcggaattgcctatttgtggtgtatgtggaaactatttacccaatgtcgcgagatcagtcggcaggcgaccgaggaggaaagccagaaaaagaagcagtgattgttagcccaggtggaggctgtatgattttcagtgataccctatattgtgagattatccaaaatggagcagtaaatctgcaaattgtttcattaatatgattgagtttgatatttctttaagaggtgagacgttgtattgggaaactagtgccaaactttatattccaacatgtcacaaataaccaaacatgtcctcaaacagacgacatccggagaaaacaaaaactcccgccaatgaatgctatagtacaatgttgtatagtgatagtacagccgagggcattcggtcagagatcaagtctagaccttgaagccaaatccagccatgcaagtcttgtactgctcgatcgtggacttgcactcctgctcggggttttcggacttggagaagagcatgcagtcatcgcgagcggtcttctcgggtttgcagacgcagcagggctagaatgaaggcaggatcagtcgcttgcgactgctgggtcggcagtatcgggtcataccttgggcttttcggactgggcgggctgagcgggtgcttgctcaggggcagtggcacttttctctagaaagcattgtataagcgagggtcaaaatatttttctgacactgatatgtaggactggcgcattgcgcatgtattcggcccgactaggtggaaagaaaccttgatttaccttttgaggaaccgaatagccaggacattgtgatggatatgtaaatgtgcttggtaaatatttccagtaaacgaaagacagaaagagagtgtcaagtatgaagttgtgaaagtcgttacacgactccagggctgacaccatcggacattattaatggcaagtgctgcgcaactggtcgccatgccccgccgtatttattctttttttctgttgtcaacaaagtcgcctctccggggtcgcctcctacactacagactgtttcggttcttttctgtctatccttaggtcttgggtctcctcgtttctaggatattgtctgccattgacctcacgcttaccctattctatttctatttcttatctcattctcccacttcaacaactaccccgccatggcccctcacaaggtcttctccctcgagggcaaagtcctcaagctcgacaccgcagaggacatgaatgcacacattcagcccttgattgacaacaccgactacactgaaatccgtctcggtggaaacactcttggcattgacgcctccaagcgcctggccgaggttctgcagaaccaaaagtgcctcgaagctgcctactttgacgacatcttcaccggtcgtctcctgacggaaattcccactgctctgaactcactcctgaatgctatcctcaagatctcgaccgtccacaccgtaaatcttaacgacaatgctttcggtctaagaacccaggccccgcttatcgaattcctctcgcgccacgtacccctccgccaccttattctgaacaacaacggactcggccctgccgccggatctcaggtcgccgatgcgctgtcaaagctggctgagcgtaaggaggaagctcgcaactgtggcgaggaggtcgcgctgctagagagtgttgtctgcggacgaaaccgcttggagaacggcagtatggaggcatgggctcgtgcctacaaggcccacgcggccggcctgaaatcggttaagatgacacagaacggcatccgatcggagggtatctcccacttgttgtccgagggtctctaccacgcgcattccctggaggttctggatctgcaggacaacactttcacccatgtgggctccaccgctctgtcaaacgccttgtccggctggccgtctcttcgcgagcttggtgtcggcgactgcttgctctctgcccgtggtggtgtgaaggtggcccaggctttggcgcagaacaagaacccgaaactccagactttgcgtctgcagtacaacgagatgaaggcggaggctgtcaagagcttcacccatgcagccaagactgcgcttcccagtctccgtcgtgtcgagctcaacggaaatatcttctccgaggaggatcctcacatcgtcgacctgcgtgagcttttggaggctcgacagggagagcacggtaccgacgatgaccccgaggatacttggggtgttgatgatttggatgaactcgaggaggaggattcggaagaagaggaagaggaagaggaagaggaggacgaggaagaggccaaggctgacaaggacctaaaggatgcggaccttgccgaggaagagaaggtcgctgagagagaggataaggacgtcgatgacctggccgatgttctgggcaagacaggtatctaaacctctggagctgttggataattgtcacttctatcagtacctgccttccatcacggacggatcatggatccaataccacgttgatatcatcaatggctgagaaacccgcgccctcggcttaattggtgtcctcctggccatccatggtccctttctgtgtccacggccacacaagcttcgggtatgaggatctcgccgacgacgcttacgctttgccttcaaaagaccccgatttttatacccccaatctccaaaatggaaccctagcttgcacataattccctttgctttgatccatattctgtttgcatagccatggacccccgtgtttgcttcggaggatacacaaccatatagatggaatacatatccggacaagcaggaacattcaaatactcatatatctcaataaataaacaagtagtgtgtatacaaagttgcatataaatggaacaaaaataatttccgaaaatggaacccaaggcttggcgcagacctcggacatcgcagctcatcaaattccttttacctcgtcgcctttgacatattccctctaccatacctgtcactattggcgcttccattgccgtcgcctttccgctctttcatttctttacaggtctcatctcgcaacactgtaccgtggacgcgaccgtgaaatatccccaggtgagttccgcaaaacacccctcactacatcttgctttgcgcaatcacccgttgttcttcccggtgcaagctataacagccacatatgctgctgcatgccgttgtttccaatcttctttgtttgttttcatcgagtttccgaggccaaatgggagagagagcggacacgtgcagttgacagtaccaccttctcccgcattgtctctatggtggggtattttaagagccatgttttgtgttacctttgttgaaagcacgtgtgctctatgatctgtgatcccaacagggagacaaatgtgcctgctgtggttctggagaatgcgccaacatccggggcttctagagaccctgtgctctatatgtttgcgatgacatgctgacagataggactcatagatcgcctggaaaatcctcactcggtcctccattgaccccgtcaagcactctaatcgcgtcatccctctaccccgcacaacatggcgatggacgctaaagagatcgaagctaaggccaaagccttgggcaaggccgcgacttcgaacgagtcgccagctgtgattatcggcctcctgaaggacatccaaagcggcgtgcgggcaaccgaagacctcctccgacagacgcgcatcggaatcatcgtcaacaagttcaagcagagcaagaccccagaagtcgcgcggctctccagcgagattgtttccaagtggcggacggaggtgaacaagcagaagcaggctggttcggcagccggtcgtggttcgagcggctctccgcggccagcgcacaacggtacaggagcgtccactccagccactgcgacaccctcagacaaggcgtcgaagctgtctgtgcctccggataagcgaacatggaaggcagacggggcggatatcaatcataccgggaaccgagtgcgtgacagctgcacggggctgatgtacgatggactgtgtgtggggtcgaccgagtctcccaaggtcgttctagcacgcgctattgcggtggagatttctgcctacaagtacctggggccggagacgaaggaggaataccgtacgaagatccgtagtcttttccagaatctgaagaacaagtccaacccgaagctgcgtgtgcgcgttgtcgagggagagattactgctgagcaattcgtgcgcatgagccacgatgagctgcgctctgttgagcagcgtgaggcggacgctaagattcagaaggagaatatggacaaggctatggttgcgcagcaggaacgcagtatcagtaagagcttgcagtgcggcaagtgtggccagcgcaaggttacctacaccgaagctcagactcgtgcggctgatgaaccgatgaccctgttctgtacatgtctgcactgcggcaagtcctggcggcagtgagctcggggtgggggagcggaaatgtattattttgggggactcggtgtttctttctttctatttcccttttctctttctcggttttttctatcaagcgaaggttatgaaggccgaagctggagttctactgtgggcctttgatttatgtcttcttctacatctcgaagctcgtctgggcaaatggatgggaaacagtcgtgaactatctaccaaaatgcagatatccgaatgattgatctcaactcttattcaagtactccgtataggtgttctactatataaacacagcaacgtcatatgatgtcagtatgcactccaccgcctaaggatctcgaaccatagcttcaatcactctcccattaatcccatactatatctacactccaaggccaacaaagatccccaacatgacaacacgctcagacctcctgaaaccagtccaggccctcatagaagccctaacgaacccaaacccaacaaaccccaaccaactcctctcaaccttcacaaccctcccaaaacctctagcctacgaacacggtctcccacaactagcccccttcctaggccggcccttcaacggccaagatggggtggcaacgtacttcgagctcatctcctccctgctgggaatcaagaacatggccttcgagcccgaggagagctgggtagttgacacgagctgcatggcagtttcgctgcgcggaacggcgacgttcgtctggaaggagacgcggcaggcatgggatgagacgttcatgtaccgcattaagcttgctgttgatgggtcaagggaagggggaaggttggcggtttgtgagtatcacgtttgggcggatacgggcgctgcgtatcttgctaggtgtgaaaggttgggggatttagtgggttctgcgagtgatggtgaggggattcatctagattacgatatgaacggggaggatatagaatagggagagatatatatatcagccaacagcaaagatatagcactggtgattgtgccaatcataaggagagagtgtcattatttgagagatttttctaggtaggtccgggtggtatacatgtattctacactctttgccgttctcctcggattattctatagggctggggcagtctatccctcgaagacgctgtggttcagctcaacacccatatccttggccatattctgcatctgggcctctatgtcatcctccataccaccacccagatgcaagaactggcgcaccttggtgaaatagaagaagatatcagtgctaaacagcaccacgcggaagataaaatggcgcccgatgttgcggatcttctcggccagcggcagatccggcgactcgataagcgcccgcgaagcccagataccagtgatcttaacacggttcaccggcgagcccaggaactggttattaccttggacgatgcgcagattgcgaccgatgaagatcagctcctgcggccacttggtttcatcgccgagcatatcacggaccgccttgcgcatcccctgttgcatctcgtagtgccgctctgcacgctccgacttgctcagtccctggagaccgcgctgcgtggacttgtctccgccgctgtagggacgcatcaacgttgctgatgcgaagatgtcagcgttgttcacgccccagtccttggcaatctcgcccagcgtgcgattgtcgaaggtaaggagggctttccagaaccgcgcgtattggtgtcggaacttgggatccatgtggatgtacaggccgtggtcgatcagaaccagctctgcctttccggacggcttacggcggatgaagatgttgcctgggtgcgggtcgcaatggacgtatccccacatgaacatctgggcagagaacagatctaccatggtcgtcatgacgtccttgactgacagtcctagcccgccgttgtggttagggcctcgccagtagtcacgttttggcttggtactcggtcgattcgcagaaccctcctgcggtcggtcaagcggtgtaccgtgacagcctggacttccctggtgccagccgccgcgccagggccgcgtgatggagtctttatcccagagtcgtacgccttccacccattcagcagtcatgacgcgcctcgagctcagttcgcggaatactcgagggatatacacgcggtcgcgcagacggggttcagcggccactagcctggccatgttttccgagttatctgcttcatttacgaagtctgtttcgagcgatagtctctcactgatatagggaacaagactgttgaaagggatgtcgaacattttgctgtagacaaaggtcacaactctttttcaatgttagcacaacattctctcgcagctgcaattcggactcacttaaaggcccagagatcccatgccaattgctgtacgatctcccgcttttggaccttgatcgcaatctccgtgccatcctgcagacgagcccagtggacctgagcaacactggcactggctctggctctgcgctccatcacgcccttatcagggtctcctgtaaatgaaacaccgaatacctcctccggcgacttcccaaaatcctcacggatgaccttctcgacatccttccagtcgttctgcggcgcatcatcgaacatgcgcgagaacatctgctggaactcagggggcaggatagcagattgcatcgcaatcgcctgacccatcttcaggtagagaccgccattatgcctcaacagatgcgacaaccgctctgcggtgcgggcgtggacggcagtaacagagctagccagtggtgggtgtgctcggaagttaattttgtagtcgagggcgacgaagataccgagagaaaaggtccgggctgttcgagtcagcgatgaggcgtagaactggcgatcgatgccccaggcgacgcctgttgctagtgagacatagatgatccggcgtaaccatttaatagttcgtttgtaggtctttgcttctctgggtttccctagggagctcggtgacggcggcacgaagggttggaattggcttgagtgagcatatcggtgcgggcgccggagtgagggacggatgacggtgggccgcacagagcggaggaaggtcgcgtacgccatatgaaattgtggggaggcggatgcccaatcactgcatggtgttggcgatcaaatccagtctgatctgaggtgaaggcaaaggaatgagaaggtcaagtgtcgatttatcaagtaagccagtaagccctagaggtcggactgtcgtcatcggtagctccgcatggagtcggagtcggaggaattcagcgatgtcttattcagctacaggcacattattaattgaggtgaatcggatataactgatattaattgcatttacagcactatttaagttgaatcagggtataattcataattcatcatggtcataaaccccaaagtatcacacactttcgcataatctctcatattctgaggaatcgtggtatcccacagctcgtcactctccaagaaccgaagctgctccttacacgattcctccgaagccattggaatcaaagtaggaagatgtttgatcgaggccttgaggaaattgcgcttgaagcagttgccaaacccagccagcgtctctggatcagaacagatatgtactccgccgcccagcattggtccacagctttccttgatcttgagcgcaacgtcgtcgcccatcttcaggagagcttcttccttgtggggtacattcatgcgctgcatcaggctgcgaacggcggggacaaaggtgttgttgcgcgtccatagatcccagtgggggacggtcggctggcatccaacgtcgcagatttcactctggaatttaccgaagaggtgggctggtcggctaaccagcgcggagacgactttgaagcatgatgtgccgagggctgtaacgggagagaagagcagcacgatcacgaggaagaggcgatcgaggaaaagccgcattgtgtgagatacagaggacgagaggctaaggaagagaagaccgagttcttctgaggtcttccaattgcagttttggtgaagagaagagaagacgtgagatctgattcccccgcatttgtggagaactcggaacttcgtcatttgatgttcacaggtgtttattgcatatatcagcaaatggacttgcatgttagccatgatcctttcaggtatctctcatatcccttgctcaagccatgaaaaccgctgattctaaatctagtgactctatcgagatgcccatacatctacaagaggtggactctctcgaagccattgttatcatcgacaatgagctagatccgctgtcgcccgcagctccgaataccgtccaagtctcggggaatctgggggcaattgccatgggctcaaagcatacactgacagaccgaggagaagcctgcaaggaattgaggctggaagatgtctgctgcgcagcacatggcttgtcgattatggtggtaagatgttctgcattggactcttgaatgcgttctcattaatcctatcttatagactgccacaaaaggaaagaagaagcacgctattctcttcgatgctggtcccgaagaggaggcttgggagagaaatgtgaaacgcctgggaccaaatctctcctctgtggaagtgattcagctatcacattggcatcgagaccactccggttcgttattgaatgaaaagaagcacattcacacatactcctcggttgttctgacattcgctaggtggtcttctgcgagcaatccgcatgataaacaatgccaaacaagccgagagccgctcagagcacctagtcgtggacttgcacccagaccgaccagtctacagaggccttgctctgcccgagcatatcatttccctcgaggctgaccctacctttgaacagattggaagtgcaggaggggtggtcgacaagcggagcgagccacacaccgtccttgatgacttctttctggtctctggggagattccacgagtgacgccgtacgagacaggtctgaagaatgcagtgcgatatgaccctgatgagaatgactggttctctgacgaagtcatcatcgatgagcggtctctcatctgcaatctcaagggtatatgcagcctaaaccctcacaggcttattgggctaaaattttcttaggaaaaggacttgttgtttttactgggtgtagccacgctggcgtagtcaacacgaccaaacacgccgtcgaactcaccggtggaacggtacctgtccatgccgttgtcggtgggtttcatctcgccacaagcgacgcggatcaaatccaaaacacagtagccgatctcaaacggctcgatcccgccgtgctgatgcccggtcattgttcgggctggcgggcgaagtttgctatcgagaaacacatgcccgggtcattggtgccctgcactgtcggctcgagaatcacattctgattccccttgagacggtttcatctgaaactctaatacccattcaaccggttcctgtaggctcgttttccacgtggacgcagggtcttgatgcgaaactgcatggcatgggttgctcgagcaacgagtttcgtcaaggggttatctcggtctcagctcggcataatttgttctgttgacggattccgattactgacataactctattcccttgctgcatttccttgcgatcggaagaatgcggatggatgtagttgactgtttctagactttgattacggagtagtaagcgtgacatgttaggcatacagtgaaggcattgatacttctggctgatttgtagcggcggtttatgatagttgaataatatacgtcggaaatgatcaattcactctggagattctccatcacataaaacattgagaagttcggagctgcataagatttgtagttgaatcgaacctgatatatatttccatgtatccaacgacaattgtatgctagcaacatctatttcctctaagtttatgagacgcggatgtttaaccttgctctaatgatctataatatcttgcatctactgaagaactttcaatatatatgttctacaattaaacaaggcagggtagatgtaacttccatccactacgttatcaagtctccaagagatcagatcatcaaacatcaactattccatgcacgttagttctacgcccacgtcagataagccaaaaagtacctcactacccatccacagcatacggacaggatacagtgtaaccaccagcaacgacaccaagaccacccgacgtcagctggactaatcctccaccgctccgtcgtgcattgttctacagccaagatcccttggtagtaaatatctaccgaatccgtgagatacagcatccaaatatcagcaaaacagtcagtttccgtcttggccgacgaaaatccctcagcggcagagtaagtagtaactagtatagttatcgatcaacatgaacaaatctaaatgcgcccctgacagcgccatgccatgccacgccacgcccctcacagacaacacctccgataagagcacgtcctaagctgtatatctcacattgctacctactgctacctacatactcacgtgcattgctccgttcgtacctagcacggagtacggagcaccccgtacgaagtacatacaagtacaagcatgcacactgcccccgccaagacgcaaccacaacaagcattaccaacaaccacccttgcgctcgtcgactcccctctcctctccaccccgccccacgaatccgatcacggtcgcccgaatcatgacctcacgccgatagaaaaaagggggctggtcagaggccgaatgcctgccaaggcgataatgcgggaggaagggatgcacggcctggcttggcgtcggtggacaggtacgagattagggcgatcagcagatcaagggagggaattttctatgtagattgtctttgatgagccgggggaagatacttgacatcattgaatgactttatcgcgttgtgtgcggagtatagtcggtagtgtagatacgtgccaagagtatatttggatatcgtcggtctttgttctccgagatcgagtgtgggggagacagggataggacgcaatactcaggataattgtgggttgatggcttcggtcgctggtttatcttctctttggggtatctgaatacatgcccaggtgtgatctatactatacaggatccgtatacttccttgggtaggtcaccaagactccgattcatagcgaactatcgatatccaagacaatgagaacaggacgcaagtcgatcccccaccccgttctgacctcagactctcataaataggcaatgcccagcgtccatactacctagccaagaaaccctagtgaaacagagccgtgaaactcgaacataatcgcgcctctccttctgttatcggatcttggcttgtgcctgtctatcgtcgatcatgaagtttaatcccacattagccatcctaatcgcgacgaatgctattgaacagtaacgctgcacgcaggcagcatgtcgatcccctcgcatcccccacgaatctatccctgtcttgcttggcatgcctagacaaggtatcccgggacaagctcgcagtacgcagagggtatacggtacctgtaagacggggaaaaggataacaaaggatactgaaacggtgtctgggctattttgtgcttgactgcgccccctggatttaaaggtagttacagttactggctgatactgataatcggcaatggatggccggggagtttaacggtggctatgcagatgccgacggaggtgtcctgcaaagagagatattccgtagcctagcaggcagtctcacaccgtccttctatgaatagtaacagagaagcaaagcaggcggcaatggcgacaccatccaattcgtctcatagcctccgatctggagaaaattgggatcaaccaggtatcgtgaacaccgccgatcactcgcccgagagacagtgacagtgacagtgacagtgacagccagcccgagacgcaatactgtaacgttaatctttctgtagcagtctgtgtttcaacattatacaacacagccaagaatatcaatacgtcacatacaattattgaccatatacatcgctacagcacggggagaggagcgtgtgcattattattgtggactcgactgttttcccgcagggtagttcgggccacctaccaaaacgcagggagagcaaatctacgaactgggtgtattaccccggagctatactaaagaaggcaataattaggtctgttagagtcatacctatgtcgtagtaacatgcatactttccttgcgtcacaggggaaagggaaaaacaaagcgactgtctttcactgattagttttttcctaatccggaaagacaacacacacctccccgacaccggactcagggcgcgtcgcgctaatggccagcaatactccggagtagtaaatagtgatatgcaaagttcccttgcgaccagtagcaagcgcggaaaatatatcactttgcatgatctccgaaaggcgacttgccagttgtgaggttcgcgtcgagggagtgtggggtgttttgttctcctgtcgatcgctgccggatggggaggacggaggggactctcttagcttgcggtctggcttggaggggaatgatttggtcgattatggggatctagactatggtgattatgtttgctcgacgtggcgtgagtcgtcttatgccgtggatggatggcctgtgtgtttatttattgcttgtttgggtatcgtgcgatagcgacgaggacggagagggtatgtcatcatagctgtcggattcgtgaaaggcttaggggaggtgactccgtgatcacactatcacccggtatcgtatgtttctgtgtgcgatctccacagtccagggccggacttgcggtttttccgacgtgggattccgacgaagagctgtctggccaggatattgaccactgttggattttgctttctcatcggtgcgtagggggcgtgtcggtacctgactactaggatctgatcgacgcagggttgtatgcagccaagagaaatgtagcattagatctcaatataatacaccatattatccgatgcacacgatctagaaatgaactgtgtacacaattcacatgaggctgactggataattctcccactattacctggtggcgcgtaatggattcatccatccgaagtaacagaagaaattacagccctgccaagaactgcacaaagaccctggaactgcgaaccagatgaagcaagcgttcaaagttggcaatgagcaattaaaatccgatatgtaaccatagtcgacgacgcctcacgcccacacaacgctcttcccaaaccgaaatcagacgtgccgagttcccgcgtgccgcgtcggagtttcgacacgggatgcccgactggccgagtctacaccttacaaacgatcatagccaagaccgagaggggaccgacataatgggaaggcgatggtccaatcgtggggcgggaacgagaaacctcaatattcgggggattgtctgcatgaggtaaggcaaatggacaacgccgggcacagacacgcggggctgagggaataatgtacattgtacggagtacggagtacacatagtatgtgctctattgtacgcacggaggacaggtattaattccatggggttgaataatatggagtccaggacggagtatacatcacctacccccgtagcaaaagaagcagcggtgatagtcgttttccaagctctgaccatcctacgccctgggaaaaggaaagacataacgtcatacgtcatacacgattagccgccgagtctgagattaggccaatatcccacgccgacatttttatattgcgattgcgtctaggctgtctaatttccgagcagcaacagcgcatttctcgtttcaaattgcttggagctctcctgcaggtgcgggaaccatatcacgctagaccagaacgggaatcggggtgaggtacgtgcacggtactcccgaggttcggtcttgggcgtattgggggagtgtttttttcgtttcatttcattttccgtgtttttttcatttcggcctttgttttctccatgggtagccgatttctggggtgagcaaatctgggatagcttggcgaacagttagggtagtacttttggtcttggtccttatgcaacatcagcaattcattacgagaatacggagcgctgtgctgtcaaaggacggacctcgcgcacaggcattgaatcccgttctccggagtgactagtcccaaggatgagagtaacaagccttgtcggtgtgaataaaggagctacggagtagaaagaaaatgcctcacgatctgagatcggcaagaaaaccgcggagacctttgtccgtacaagctacgcgacgctagcctccttagtggtaagctatactccgtaatcaaggaacgatgtggcaggcgggcgatcattcagtgggccgcgagggtttgattcagatgagagcttcctgcaagcgtatttcgcgcccgctgattgctggacggagctctggtccccatcgcactattcgcgctactgtaggtacacggctgcgaggcgaaagccaagccggtgctaggagaggtggtcgataccgggccagtagacgcagatgaaaggggatgccaatggaaatcatgtggattcagggatctgggttcgatgatggagggaaattaagaattaagttgtgtgtccccgtcaattcgacatgaccctttcacatgttgactaccgagtagttaacgagtgcgatagactttgctttagggctattattcaatacggcatgtccaagctgaaggacggtcccccgtatttttcatttcagtggaaaattcaccccggtaattacctgactcagcactccctaacgatcatgattggtgggggactggggtaatctcgctactcgggcgttccccgaatcagaaatgcgcttttatggattttcaatggggtatagaagagcatcgggttagtctcaacacaaagcgaaagcggcatgataagaagtcatgacgtgatactgttattcttatcatccatgggctgtcaattcgcattgtgccgacatccgtctattgacaaggataaagcagaggcaagggagggaaaaaggtaaaacgaaaaaaaaagaaaaaaaagaaaaaccacctgcagcaaacctgcattgcatccatgggacggtgacgctcgaaggaagaggaagccttctagaagccatccagaacaccctaaatcgataaccacacgcacctcggatccactccgagaaatgtccaaatggagatgatcaccgactcggcaccgaaacctctctagctcgatccctctagggccagcctgcagtttactctgcacgcagcagttttgatatcggcctcatgcctcaccgtcctttacgacttacgatatccagcaattgatcttcaatttctctctttcgttagtacgcccggttcggtccggcgtgtggcaatcataatcatctgaatgcgaatggacatttgcggcattttgttgcatgacgcaggacaagacacatcacgatcggaaaaacgagaaaaaaagcccgtgcttctcgccgtcagcacgctgaattgatctattgatctccagaccaagcctgcaagcgagacggcagcagcggcgcgatcgcccgacaactgcgaggaatctccgatgtctttgaaggttggtttccgggaatataccttcactaactacatatcgggcttgagacggtggcggcgtcgatgtagagctcatatccgaccgggaagaggtgattcgccacgggcgcatatagatcaatttttatatggagttctccgtacttcgtctccgtacaatcgttattcttggggtgtgtagcttccgttccggtgggatgggcgatcgtggaacgtccatggatgtttcccagcctcccaatatgggcataccgtgaatccccgattacgtctgtgatataattggaactgggtattgggtgcatcatctgtacggagtagcgtgcaaagtacggtactccaggtacaaagtacagtaaagaatagtagaattgactgtcccaagatatattgatatctactatactctcgtacctacggctacggatctcgtcccacaccctcatccatggctcgccgtgggggaaaaaagcagaaaagtcgaaatttgccaaaatcccaattctcgatgcttcggttgccccattcgaggcattttcgcatgttcccattgattgggatacacagctctccactatgcgcctcggttttggggatttggtctgaacggtcctggacccgacagatttttttgaatcagaacaatggcccgatattctggtcctgatccatgaaagaaaaaattcggccagtgacctcggcggcgttgagaacagtcccttctcaggatcgtgcactgctggccttggctgacgtggattttcgaaaggctaaacggcgagaatcccccggaatgatcgcaactcaattggccttttttttccttttttttccttttcccgtttccttttgcgtttttccttcctttctcgcacggggctgcagggggacgaagcgcagactgtccagcgaataggggcttgtagcgggattgccagaactccactggcttcctaaaggagtttggcccatgagctatctgtctctggagctgttcttcgaccgtcgagtatggaggagatgagacaggggctacagagtgacgatagcgggctacggtgaacgggattgtcttgctctctatcttttgcgggataatcaatagctcccacggaggacagttccagaatggaaggtgatcttttctccgatagattatattaccatggcgaggatatggccagaccggggagctccataatttattcgccctttacatgtccgcaattggttcgcgttgtgtcggttcgccttccgcgtaaagcgccgggcaccgttgatgggaagtatacaagacgggaccgacaggattcattatcgcaagccatcgatcgacgtatcgtctctacggatattgtacgatgttcgggagacgagaacgagaacagaaattgtctagatcgcggagactcgcgataatatatcgtttcccgttacctatctccaacggcgcgtgcacgatttcaaccccagccctgaggagattggagattggagatggagatagatggagattggtcttctggggaagacttgccaagggcacattcgccggaaagccggggcgagtgcgggtgcatcaaaagtatgggaaaccagtgactgtacagaatatgtacagactccgtcctgggctgctccatcctaactatcatatacatttcctacatcctgattcgaaaccctgtctccatccaatcgcagtcagccttattctattgtatgcaccgcgaagcttgacggtgtcgatggagggtctgatcgtggaccatctccagtaatatacatccgatgacccctgctatgtacatatgctttcgaggatttacccgcactcgggcaacccgcatttgccatcgtgaactaggtttgtgattgaattttccgttttggccatgtacacaaggcgatcaatgtatgtatgtgctggccggataataatagtagtctccgattgaagcgacgacggacggagtatagtgaactttatcgatgccgtcttttctcgattgagatctacaatatatcacattatacgagcaaacaagattgccactgagataccttgaagcattccgctgaactccgtataaacacccatgttaagagtcagtgcttgggaacagcgtcggcgatcaacaatgatgaaatcatcggccggcgtctgcacacggtgattcgatcaaagccttagtgtagctgttagtgggcctacatggtactgctggccaatccggagcaccgaattaaatgccgcttctggggacgctctccacgaggccagggggaaagagagggcgacgatcgaccgtggtcagagggacgaacgaggcagctgcagcgagggcagtggcagtaggacacggcagtgcgtgctgataccagcagctgaaaaagaaggcccggggaagttcgacattagctaattgatgacataatggtaaggtacagcgcaggcgtaatccgtgggtaagaaacgggtaattttcaacatgcttcaacctcacaacattggcatatccagatctgtcaaccgtttccggaccccttgctatgttaaaatcccatgcgattttggcgtcatcacagtcacagtggcattttttcgttaccttgtgcgtttagtgtttacgggcgaaagccggactcggtcggcaagtcactgaagtatatacatatgtcgctagccctgacatgggcaaatgaaggcatatccgtatcaatagactatcttgggactatctcgggctatgtcgctaaatagagaaacattctcctgcaagggcattcctgctctattcctttttgccaaggccgtgaattctccgtgaaaacacacctaacctgcgcggtatcagaactggtcgtagtgtgtcttttttgctgctatgcttggggtcgcggggcacaccccagacacaaaaatcgcgcatagtgtcaggacccggggcagagacttgcgtaaaattgtgtaccgattttatacgaaagtgatgtctgtggacgccaactcggcagcgcggtgccggtagcagagacctctagagtgagagtcgtatcggtatcgcgtttttgcattgttttgatgctaatccgaaggcggttcctgacccactttctcgaccgcggctgcaatgtgactggctgcagctggctttagctggctttccggtaccaggtttcttggtagggcaaggggtaaatcttggtatcgaccgagattcattacagggctaaccctaaacgggcaggaaaagtggaaagaaaacagaaaaaagtctaattattcccaaaagaatggcccatgagcaggtcgagcagtacctagcttatagcttccccagcaaccaaatccacaggtatctctcccctcaaattgacaaacgcgggatttcgtgcaaatacctctctccccatttattttttatttcttttattttttaattcccaattttgcaaattcaattcccaaattcttttttctttttattttttttattttttaatttccctcactcttttctctcattatccacctacccactccggttttgacccccccgtaatccattataaaacagcccttccttcacccatctcattttcttcctttcctctctttacataggatctattccgactctgtcatatcgccattccgttgttctttctcatatcgttgggttccaaggctgtgtgagccgaaagcaacaacaatggcggagcggagaatttcctatgctgttgatgtcgaaaatggtggtgagcatcgcacccgtgaggctgatgatggcaatctcgacgagtactctgctttgaaccgatacatctccactgcccaaaacaaccgtcgtggctcgacctccagcgccgctggtaagagcggcgatgactccgagaagaagaagccctggtggaagttcggtggcaaggtcgtgggaggtgtcgaggaaggtttcgttacccccgatgactggctcgagaccgacctgcgcgctggtctcagcagcagcgacatcgagcctcgtcgcaagaagatcggctggaacgagctggtgactgagaagaccaacatcttccttcagttcctgggttacttccaaggtcctattctttatggtaagtgacctggacttccgtcttcaggacgcgtttccagccaatcagcccactaacgccttgctctcccacagttatggaacttgctgtctgtctcgctgccggtctgcgtgactggatcgatctcggtgttatctgtggtattcttttgcttaacgctctcgtcggttggtaccaggagaagcaggctgccgatgtcgtggcttctctgaagggtgatattgctatgcgtgctctcgttatccgtgacggccatgaggaggagattctcgctcgtgagctcgttgctggtgatattgttatcgtcgaggagggtaccgttatccctgccgatgtccgcctgatctgtgactacaccaagcccgagatgttcgagacctacaaggaatacctcgccaacaccaactccgacgacctcaaggagaagcacggtgacgatgaggatgatgatattgagacccaccagggtccctccctcattgcttgtgatcagtccgctatcactggtgaatccctcgctgtcgacaagtacatggccgatgtctgttactacaccaccggttgcaagcgcggcaaggcctacggtattgtcactgctactgctcgtcactccttcgtcggtaagaccgccgccctggtccagggtgccaacgacactggtcacttcaaggctgtcatggacaacatcggtaccactttgctcgttctcgtcatgttctggattctcgccgcctggattggtggtttcttccgtcacttgaagattgctacccccgaggacaacgacaacaacctgctccactacactttgattctcctgattattggtgtccccgtcggtctccccgttgttaccaccaccaccctcgctgtcggtgccgcctacctcgccgagcagaaggctattgtccagaagctcactgctatcgagtccctcgctggtgtcgatattctctgctctgacaagaccggtactctcactgccaaccagctttccatccgtgagccctacgtctccgagggtgtcgatgtcaactggatgatggccgtcgccgctattgcctcttcccacaacatcaagaacctcgaccccattgataaggttaccgtcctcactctccgccgttaccccaaggcccgtgagatcctctcccgcaactggatcaccgagaagtacactcccttcgaccccgtctccaagcgtatcaccactatctgtacttgcgatggtgtccgttacgtttgcgccaagggtgccccccgtgctattctcgccatgtccgactgctcccccgaggaggccaagctctaccgtgagaaggtcaccgagttcgcccgccgtggtttccgttcccttggtgtcgccgtccagaaggagggtgagccctggcagcttctgggcatgtaccccatgttcgatcccccccgtgaggataccgcccacaccatcgctgaggcccaggtcctcggtctctccgttaagatgcttactggtgacgctatctccatcgccaaggagacttgcaagatgcttgccctcggtaccaaggtttacaactctgagcgtctgatccacggtggtctcgctggttccgcccagcacgaccttgtcgagaaggctgatggtttcgctgaggtgttccccgagcacaagtaccaggtcgtcgagatgttgcagcagcgtggtcacttgattgccatgactggtgacggtgttaacgatgctccctccctcaagaaggccgattgtggtattgccgtcgaaggttccactgaggctgcccaggctgccgccgatattgtcttcctcgcccccggtctctccaccatcgtcgatgctatcaagttggcccgccagattttccagcgtatgaaggcttacatccagtaccgtatcgctctgtgtctccacctcgagatctacctcgttacctccatgatcatcatcaacgagactgtcgactcctccctggttgtcttcatcgccctgttcgctgatcttgccaccattgccgttgcttacgataacgctcacttcgaggcccgccccgtcgagtggcagttgcccaagatctgggttatctccgttgttcttggattcctcctcgctgccgctacctggatcatccgtggtaccctcttcctcaagaacggtggtatcatccagaacttcggttctccccaggaaattctcttcctcgagatcgccctcactgagaactggctcatcttcgttacccgtggtgctaagacatggccctcgtggcagttggttattgccatcttcatcgtcgatgtcctctctaccttgttctgtgtcttcggctggctcgcacccgactggaagcagacctcccccgtcgatgccggcggtcctggcttctcccacaacaacgatgtcgacattgtcaccgtcgttgtcatctggggctactccatcggtgtgactatcatcatcgccgttgtgtactacctcctgaccatcgttcccgctcttgacaaccttggccgcaagacccgctccaaggccgacaccaagatcgagaacatgatcgcccacctttccaagcttgccatcgagatggagcgcgacgcggaaggaaagactcgttacaccatcggtgctcgcgccgaggagatcgaggacaacgagtaaacgctcgtcccttagcttttttgcaactcgttactgattcgaggtctaatttctctttttatctccctgcgattacccgcaaattttgccgtgccacctaattgaacatgcatgccgtgggagtcaagaaggtcgagttccgacttttttcgcttccttttacccgtattatagactttgtgtgtttcatttacccccctggctgtggtttgctttcgagttgctagagtcatgtttttattctctacgtgtatgtatgtcgttaatagtggcacttagtcaatctaaagggattctaatcatttctgttctactgtaatctcgtaacctttcgtctgatctttttttgttatgctttcgtctgatcttgtcgcctattgtttgtctttggtctcgactctcccagtctcataggtggaagtaattctccgttccccatattttccccggatgaattcctggagacaagcttcaccgtctctttgcatcatgcatgaagtattgagaagtaccacaaacactcgacttcctactttcaccggattctcacctatcctggcactagtctcgctcaatatgaatctctaattttccgtctcatgcaactagctacgcatctataaactccactccaaatgccttattagaacaaccgtagatcgtgcccatcggaagtaaacaatcacccacacaaccacgatgctcccatacatcctctccctactgtgtctcctcctccacacccaaggagccaccactacccccatccaccccatcaccagacaaacctgccaatccaccggccactgtccaccaggaaccctaatcgtcagccgaacccccaaccacaaaaacaccacgcacccaaccctccaatccgccataaactccctccccaacgacaacaccccacaaacaatcctcctcctagcaggcagctacatcgaacaagtaaacataacccgcccaggcccactaaccctcctgggcgaaacaagcaaccccagagacgcatcccgcaaccgcgtgcgcataacctgggccgccgccaacagcgacagcaccggcgccgtcgacaacgtcttctccagcgtgctggtcgtagcgcccacgctcgaggccagcctcacgggctcgggcccgacggggtatcccgtgccggcggacacgccgttcgggaatacggatttccgcgtgtataatgttgactttgagaatacttgggcggagtactctgatgggccggcgcatgcgttgagtcttagtcgggctaatggagggttttattactgtgggttttattcgtatcaggatacggtgcgttttagcttctttctaactgtgcttttggtcttattgttgagattattattcgttattcgttgggagtgcactattctcacaccaacactaacccccacaggtctacataggcaaactaggcaacgcctacttctaccaaagcatcctagccggccaaaccgacttcctctacggcttcggcacagcctggattcaatccagcgcgctccagctgcgcggctgcggcggcggcataaccgcctggaagggcacgaacaccacaaccccgaacaagtacggcgtgtacatagtcgactcgagcgtgcgcgccgcgaatgcctccgtagcgactgatatccagggcgcgtgtgcgctcggccggccgtggaatagccagcaccggtcgatctttgcgtgctgttatgaggacggcagtgttgatccgcgcgggtatgttgattgggttgttggtggtgttgggcgcttcgaggagggcgttacgcttatggcggagtatcgggattttgggcctggggttaatgtgactggacgggttgaggggggtgttacttctgttcttggattggggggttgggaggcgtataatactccgctgaaggtttttggggatgtggagtgggttgattggggggttgttagggggactgattgagttcgatgggtcttgttggtactagtgagtagtgagattcctgttaaacagtgcttgcttcacttctacatcctaatcgtaccaggctcctggcgcatctccccaatagccttcccctccgacgtcccataagtatcagcatacctccccgccatccactcgtgaacggtaatcgggggatatttaccaccctctgatgtacttgtatctgtatcctcacacccaggaagacaccggatagtatagtttggattccccgagaaaaagaacggaacactaaagcgctccttgccactggtattaatcacgcggtgcagattcgacaagtaccgatcattcgtccagcgcatcatcatattccccagattgacaacatacgccccagggaccggggtgacatcgacccattcagacgagaggttattccagacctgcagcccgcccgtcccatcctgcatgagcatggtgatagcgccgaaatcggtatgcgcgccgattcctagagtcgacttgttagtccgtattgcttgacgaattcacatcctaacacaagttcactaacctctctccagatccgacgcatcatcctcctggggcggataccgaagcagtctaagaatagagacggggtgatcacagaaatcaccaaaagcatgctcgtctagaccgagcgtgcgcgcgagaacttgcatgatggctacagccagctcgatcatcgcgtcgtggtactggtccatgacgcggcgaaagccttgaacgtcggtcacttcggagggatacttattcggtccgtggccgaagcggcgctggacgacgtatgggtcgtttagggggaggtctttgccgagatagaagccttctttgaggtcgccttttgtgcgtttttcgaagttttgggagcggaggcgctcgtagccgcggttgaagccgccgatggctgggggtttagtttctactgccatttgatggagttgggagaggctgtattaccttggttgtatttctcttttgtttctaaggggaggttgaagaattcgtttgagtgttgtaggactgcggcttggagttcggttgggatggcgtggttgattagctggaagaagccgaattgttcgcatgcttgttggatttggtggatgaggtcttctttggttgagtcgttggcgtagaaggctattgaggggttaggtattctcggcatataggatgctaagggcacttattacgggcgaaatcaatgattgggggttcgttaggcttcatcttggaggtagttaggtgtaggaagtgagactttaaagtcttttatagctgtttatacctgatcttggtcttatatcttcgaaatgcggggaattcgttatctcttcactcaattttgtacatgtactttacctatctgtcggaaatccccgctcctgtgcaatgtctgaagggatttttatggctcgggatggtggaaaactgtcggagaagggtctcacagccgctacgtatgtttagtctgcatggttgacctgatcgaattgctagagagatggagaagataagacaaaaaactgtacggtacatgcatgtgtagtacaataaaactcaagggtccgaaagaaccccgagagggaacaatgggtatcatattcgctctaatcaaatgctaaaaatgcacgggcttccactcctgtccgggataggacgtgggggacatgacgatctcctcactggagcggtctgcggtgatggcaagctctactggctgaggtgggttgttgaccacacggacccggtcctcactgcgatgaggatgcgcggatatcgcgtctgagatggcgatgttgcgggatgcatggttgtccaaggccgggaataccgagtatgtaaccgctggctttcgggattgaatgctgagccgaggagccaggctttgttggttggaattgcctggtaattcgtgttgttgcccgtggtttgacgcctcggatatatccccgtatagttcgtgtcgaaggggccccccatgaatgtgctccttgtcttcctcatcgtcccgctgctcttggttttggtcttgggtgccttgcttgtgctgctcctctccctgcagttgatgtatttggtggtctggtaactcctccaacggtgactgtggacgtggaactctatcctcgtagaatgacctgggagacggtgaccgggaatgacttgggagaggcgggccgagtgtgccagcagggtgagacccgggggattcattcatggatttaggttgaaactgcgagtaaaaccgactggtcgccagagaggatgacaagctgggtgggcgtggagtcggcaaaggcttttggtcaaatggattgctgaggaccggtggtccatcctgtgtagcgagactagtattcacatttccacttggcgacgggtgtgtcggcgagtatttgttcttcagctgctccgacatggttcttgtgtggtctctcgattttctctcagggtcgtgggagtcttgccggccaaatagtccctgtttaagtcagaaaaaggaaacaaaagaactgtccaagttgacatacgctaattctgctgaaccgtttccgctgacctcccgggggcgcctgaggcccttgcggttgaataccagagaggagatctcccacagaagcgcgtcgtcgtctcccaaagtccttcagttttccaatagtagatcccccattctctgcagaagatcccgatcttgaagcttgtgaaagaccgttagcaggtgtggacgggcgagtgcctttgctattggcgctgcgctttccgaagctaccaaagctcagcatactgcttcggtttgccggcgagtatctgacttcatttctcaaggggctttgcacatctggagcagatggaggtgggccgttgatagattttcttttggcttcgagaacctcagcagaacttgggaaccccgacgaatagaaaggtatgaaagaccttctcttcgcttgaacagatggctggtcatccacagaatgctcaaccggtttataccggggttctggggttacctcgtttgctgcatcttgcaaaggagaagggggatccctgtcaagttcttcgtcagatgtacgtccggcttgctcgtcagctccgagtgtggagacggagggatggcgtctataatcctggctaggtgcaagcccattatcattgtccttgggaggaggcgaagtaggttgaggactttcatcaagcactggacggatcgacggggtaataatctccggtgtggacttgcttggctgatgcccccggcggttcgtaaacgggaaaggtacgtgaaaaggctcattgggaatgactggcaaacgattttctgcgactggggctttgttcgacagcacggattgattgccagttgggatctctcctggttgcggtatttgctctgtgaattgacgtttcccgccatttacctggctaaatgcattcaacgacatcggtgtacttgccgcccttcggtggtgaggatctgtaggcgaaagaccaagcgcggctatcatctcctgctctaactctccagcaaaggcagacttccccggaacttcaggtctaggagggacaccgctggaagaggacacttgcttcggttgcacagctgtctcgctaacacggttgtacgacgggtagttttcccccgacttggtcgctttgacaggttcgctagaattgtgttcatcctgtcgatctagacagaaactgacccccggtggatcaggatcagagctgagctcggttcgctcagatttgaacatgggtagactgccaatggcgacagaattccgcagagaagagttaccagacacctcacccggccttgaagggaaggataagtgaaagctgcggcgggaagcacttggagttgactgaacctacaacattaccaacatcagaatgtaaacaaacaggggcggaatgttagattgtagcaaggaaagacgcatcaatcgtgtctcattctagagctcaatgcgaaaggtgcgcggaattacatcgtggtatccagaaaatgaagcagcgcagcgatatcgaaagggaaacattaaagcgacggcctccaccgtgcttacccaaataaacgactcgctcaaacgaaaaaaaaaaaaaaatcaggcatctaccttctcagaactgccactgggtcggaacctgcttctgcccttagcaaacagccccttggctgctccggtagccttgccactaaacgctcccgcagtatgaaggagctcctttcctttctccccgactttctccttgttcatcacggtacccaggtggcctgacggacgtcggatatgggtgacactagttggagcaccgtcattcaaggaaccgagacccccaagagcacctagcttagggaatctgatgcgcgaagggtctggcacggtaggggagagattctggctctgttggaccacgtcggcatactctgggtgatcatgaaccataaactctagccaatgattcaaaccagtatcaacggtggcgaactggtcgcgggtgtgttcgaaagacttgatacgctggttgatagatgtgataccgatgatttcacggaaacccaaaagtttggattcatcaaaggatgagctgccggcgttagaagagatatggaggggcggaggtggcgtagctcctggtcccatgatttgctccggtggtgtaatgttctgcggaacaggtggaacaatcgaaagtcgaggcctttctacagcacgctgagtagttccttcttcatcagaagcaagcgggtcgtgcggcacatccgacaagacgggctcctcacttatcggctcaggctcttgcatagataacgatgtgtctaaaggaggaggcgacgaatagccgccaggcatttgaggcgcctgtatttctgccgaatcagaggattcccacgaaaaccgtctttctaatttgggcttctttagcggatcaacgttcgtgccatccgcgccttgactggtcgcataagggtcttgagacaccgaaggagccaggttagtccagtctggctggctttcggaaaacaactcagcgggtgcctgcgattgaggttggttgctgggcgggtcctccgagggggtggcttcccgacttaatgatcggataatctcctccctcaagcgatcattgtcggtattctggggcgattcctcggctcccatgatggtggggatttcgccatggaaggcgtcagagcccgatgcgcttccgaatttgagaggggcaggcatatcctgcccattgttcgagtatgattgcatcagtgcgttcggaggagagattccctcatcagatgattctggtgagagattctggagtagaggaatggaggataattctgcacggcccgccgttggggtgtcctggtctgtgaattggggcttcctcgaaggactgttgtctgaactaggaaggctcaggtcccggcgatgacctaggtttaacgctggaaccgcattggcagttgccttcggggagtttgactcatttggttcctcgagaatggtaggtgttctttcatcagtcatagtacgactgcccatgatagggctgatcgtcgaagtgccatcgctgttcgaccgtgtgaaactagtggcggtagattgtggagtttctgggacatcaaaagcctgattcactaccgatcggaatcccgtggaggagttgtgatgcaaatagggctcctgagatgcagagctatccttcggcgggttggagtctgcaccacccaagaaatcggtaccaaagctagatacgcgcttgacttccggtagacccaaatcgagctttcgttgatctgtttgaggtggaactccaaacccgtcaggcttgggatcattgctaccagtgataggatactgctgtgcggctttctcctcgcgcatgcgtttatagaggtcggccggccttacaaagggcagggccttttggtctcctccactaagattcctacctttgttatcagccaagtgcgactcgccggctccgagtccgatgctagacaaacgcctcgaggacaactcggatgagctgccagtgttgcgggtgacatagggcggccgatgtactacaggaggcgcctcctcctcttcatcgtcgtcgtcgtcgctaccccagtcacctccatcataagaatattgcttcgcttccacccagcgttttgttttggagcggttcacgtttgtttggaatgagatcggggttccgctgcctgacgagagcggactgagcacagttggcggggaagggctaaagcaggtcttagtatttgagaactagatatgcgactagatttggataaatggtcttacagttttggggctccatggccctgcgattgggttgggtctgccattagggaacaggatcaaggtactgagtcgcgcgcgatcaccagcatcgactgttgcctggtggtctctgataattttgcgcaagagaaaattgtaagtgttagagaagaatgtgagcagcaacgttctcttaatgatgtgtatggggagagaaaggtggcgatttggcccaagttgggcaagcaccaatcaaataggttgggacaattggatgaaacaagatgtacaagaatgacgtgtatccacagcggaacacaagatcaagccagctatatcaagaagaatagaatagcattagtatcatgaaacgagctaagttgtatattccccctgatctaacgacgtcaaagggctgaattcgggtggcggtgcggggcttatgtaacgcgtttcggattccaaggtttagttacgtggacgaacggggctcattgcgacaagtcgaccttgtggacctcgttggccttgaccctccatcttcttacttgactgtacggagtatatccggtctgctttgttcctggattcaagtcacgttgtacctcggagctctttacctgcaaccggacacgtcttcacctcgccccccttatcgattgcagatagatcacatttcagttccaaaaccgagttcggcctttgtcgacattaatttacatttgcttctcaatactggtgcttcttgaaagactatagctactagtctcccacgcttcacatcttccacatcgcacaatgaccggcccgtcgatacaagacaggaccagcgagttcagcgcgatcttgggccacgcccagaagcgcctggggacatcgaaagttggttcgcagcgccaggcattgttgactgatgcgcaaaggcgacaagccaatgtgtcgccccaaggtcccgtacaggaggcgaaggcggcaaggtcggagttcgcacggcgggcgcgagatatcggaagggggataactggaacaatggcaaaattgcagcgattggctgaatgtaagtctggtcacgtcgctcaaaatgccagcaatctaacgaggaaacagtggcgaagcggaaaacactcttcgacgaccgacctgtcgagatctccgaattgacatacgtgattaagcaagaccttgccgctttaaaccaaaacattgcctcgctgcaggcgctcacccaagcgcaacaccccaaatcgaatcgctcgaagacagaccaggagggagaacacaatgacaatgtgagtgaggcatgggaaaggccgcgcacggacaattcgctgattacccatttcaggttgttgttatgctgcagggaaagctggccgatgtaggcgctagtttcaaagaggtactggaagtccgcacgaagaatattcaagcatcccgaactcgaaccgagaacttcgtttcctcagtatcatccaaatcacacagcgccctcgacgcacagcgctcagactcgcctttgtataacaccgcgggacgacggacacctcagcccggatatcaaggcaactcctccgaccttttgaccctcgagccctcaaacccttcgcccttggggcgtccgtccttccaatcagatcaacaactgatggtaatggaagaaggagaatcgagtaatacatatgttcaagctcgaggcgaagccatcgaagccattgagcgaactatcagcgaattgggtggcatttttggtcagctggcgcagatggttagcgaacagtcagaaatgattcaacgcatagatgccaataccgaagatgtggtcgacaacgtccagggagcacagagagaactaatgaagtattggacgcgtgtctccggcaatcgctggctcattgccaaaatgtttggtattctgatggtatgttcactcaataaatttcttgtctgctcatactaatgaccgttctagattttcttccttctctgggtcctgatttcgtgatagacatgatatctgcccttttttcatgctgtactataatatctggcccgtgtgtttcgacagatcatggcctttctgcatatctgcactcgctgagcattttcatgtcttttactgcctggctagactctgggatgtctaattcatcacgctctttatcttcgtttctacttttttctgtgccctgtgctctttgttgcttgggactgtgtcctcatgagccacacgcgtaaatacacctcaagtactatttgaattcaatgaaccgagatcatgcgataaccatgaatcacttctacattttgaagccagtattcattctatttatatcacgcatcaaactgcgtcatcacattccacagttccgactccgcccaccctaacgagggctgattatcgaacaattcccacacaagactgtcatcccatccccccacagacggtggcgcagtgagttctccggtggaatctgcacccccaagactgacaaaagccggagggttattgtcagtacggccaaatatatctgtgtaggacgcaatattgccctcggtgtttccagctgtgttcgcttcagggagtgcagcttttggctgttctaagcgggaaggttcggggttccctttgaccaaaggtgcacacaggtccaaaaatttggagaatagcttgtacagcttgccgatcgaggcattcgcctctgcgaattgatgtaggtcgccggtgatgtttttgatcatattgaagtctttctcgtttgatgttgcgatcacattgcagaacaggacaaagaacggtgctagaggaaatagcagcattgtcctgttaaagggtcattagtttcgattgtaaggtattgaaagtggctttaaaatagctatatcataccaggtaagaaagtatggataggaatcgatagaattgatgcggcttgagcatgcttcctgtaaagctcggagagtggagagggcttctcgggctgtgtacagacagttctcgcaaaccaggcgagacttgagtaccgaggagcgggcttggatgatggtcgtgagaatagagtagtagttgaagtcaattgatagccattcgcgccgcagatggctccatgattgtgggaattgctgttcttggtgacgacgagactgaaaattgggttagcggttatgctggcggatccttgatttctcttactgtttgcatattggagtggattatttgtgcccgcgccacaagatcagacagtatattggccttctccgtgtctccggttgtcttgttatcgagcaatatgtacagtagagtattcttcagctctgaatactccactatgcctgtcatcatagtagatgttggtagatcagggtcgatgtggatcaacttggttggtttgactttcagatccggtagagacggtggtcggaggagcaggaggctgagtgttttgtcgaagtagtagcacatgtacacactagcgtgaatattttcctctatctgacttcgaggactggtatctgtgatgttgtgatagttcaaggaaacaatcatccgtgacgctagtgctgtcaacatccagcagcgtgtcatgtctcctaaatattgcatcaaacgggtctgtcgtgagtcagaaatgagtcaatgtatataaagccacgtggaagagacaggagaaacatactgcagacagaaccgattgaagcaaaagaagactaggttcagctgcgagcggaatttgattcaaaatctctgtggcagctacttcataccttttcttgagtgaccgaaaatgatttctcaaaggctcgcttataatgagaggggccatttttgatatacaaatcatggccttcacccagacaatgatccggtaatgctggagcacttgctcacattctgtgccctcgataattgcaaggcccatttgctctagtactttgtcggagatgtgatcaggccaattgattgttccctgagagttggttttcttatcgggtcctatgatgatcagtatcactgacatctgacccattctcgaaacttaccaggtagcatcatgtagagtaattccggtgtgagagtaggtggttgtatggtttcttgaacatccgtatcaggcatagccgcagtctcctcccaatatagagtcggattggatagctgactgacgaacttgcgcgctgattcaagtgccgtgcgtctatctttcgacagagcagggttgcattggagttcatgctcaatgtactctctagcctcactcgcgtgatgtgttgagccaggagaatgtgcctggtgcgccacactctgagacttgcggtgcttacttagtggtgcctgcagggcagctgtgtcatggggctcatatgctcgatatcgcttctgattgtcgttgagaacttcagtattacttgttaggttgcccgaaggcgaagaagacgttgtgctattggcgtaattccttgctggaaagtatattgcctctttattgcttgactcttctagcctcgccaacctttgggacaatgtctccaatcttgaaatgtcagctatagattttaaagacgcgcatcgtgaattgcacgtaccgagagacccgtggtctatgaactcgtgcctggcgattgcggagacattctgcacctgcatcggtacagttcatgcaagggtcctggcgatcgcatttcacctactccatacaatgacccgagataagcatctgtcaaagaatcatatgtgaaaaacgaatggttataccttccgagtatgacataaatcgcactggtagccgattagctgagctacattatgtttgttttagaaacagcctatgcctttcgcgacgacattattcaggcaaacttaccgcagacatattgatctcggaactcgcaacggaatttcggaatcaaggtatattaattaagcactgggggagagaaaggtgtcggttgaagttgtgtgctcggcgcccgaactgccgggaaccgagcggaagcggtttagcgcggagcttcatctcacaggcgcgatatattttcttattagtattatagctagaaggataagaggaactaattgtatagtatatccaagagtatatccaaggcgaaaggagtataaaatgtgatttacaatttgcattgaagacttttgtactattccaagctatcattcgtcataacaatcatagcaatattcacattccaatctcacaatggacccgtggagaacgtgcaattctgagtcctgaacagtatgcggaatagcccctcgtcggtccatctcattttgtgctgcttggaaccatatatggtttatttttggctcgaggtctgattgttcgccatgatcaccgagagacgcattgtactcgttcagatcccatcgcatcgcccacagaaactcctttctatgagaccacgtggaatcatgctcgccctttctttttctttggttatccttcgcgatggaaacaaagaagctaacgattctctccatggtggaagtggtgagaaggagactaaaccagcttttcgcggaggaatgggggatttccgggcccatcaagcgctggaccgtcgaaaataaaagttgcatgcagtggtgggtcgacagaaatatatgtgtatcgtcaaaaggcgcattacggagaattgattgctgtctttcaatagaagatgccatatttttgtggcgatgacccgagtgatcagagtcagagtctgaagatgcggatgattctaagaagaatactgcgtacgctctatattcgagttagtaagcttccaagaaatagtacagtggggccatacatcggatacaaaagcttggcctggagcgaggctacagctttactgtagacaacttctttctctgtttgggaagacgaccacaaatgctgcgcaattgtactggtctccagatgatgtgcgaccacatgatcagccaggtggtgggagagtcggatgcaagtattccagcatcgtttcagatcgccgagataccccagagaataactagcattgtcatgagccacgcctttgctataatgaggaggtggcggaggaaatagctcggagacgaaggcaatatcatcacccggcgacaggctgccatcaatacaatggcctggatgcttctgttttcggagttgaatatatgcccatgctatggcaaattccagcttagaaacccggccatggagcgctcgacaggaaagagacaaagacccaatatccttcagatcacaggatgctaggatcataacaaagatatgagatgggagccgctcccatcccgaagctttggacgctttcgacccagctgacatcgagccccgtttaccccttcgaaggaccgttcggactcgatggataaaatgcgtatgtgtcatagttcatacttttggtgaattatttgagatattctttcatgtacctccgaaatctttgagatgaaaccgtaaataagacaaatggatgatagaaacttagatggaatggcttcagctgtgatttgagtgtgcccagactgtaaagacgcagttaaaggaccgaacagagtactgcaaaaacaccatttgatcctttcgagcgaagatgtggagtttgaaacaaccgagattgggatgatgccggtgatgtggacctcatgccttatattcaaggcatcaggatctcacggacatctgccttcccgatccttgtcctttcctctcctcaataccaccagagatcaaattgcttaatcaagcatgctagtcatcaatgtctagctgggttgttttccaaagagagctgcagcgatggtttgtctaaatagctccttggatggtgaccgggcaatggactcgccatccaaacaacccgcatcgttcgcatgcgtggtctgtcacgatcggaaggtcaaatgcgataaacaagacgcatgtagtccctgctcaaattgcgccaaggcgaatgtggagtgcatctaccgtgctccaccaccgcctcgtcgcaaaagggaccgagggacaattgaaagtatgtctcaaggacgcggaaaataccttagacgcaacacggaattcgaaagaaatccatcgttcactcagaatcatcatgattctgcggagggaaagcaacagattgaagcagggaaaagtggatctgggaggatgatcacgaaagatggcaattccatctatctcgacacgtgagttgctttgcgctgcatttgacctaatgtcaaagttgaagttctgacttgcacatcagcgatctttggaccagtgttagtaatgaggttagtattttctgactgccgcgtgctgtcgatgctgaccatctttgctagctcccaaatgcagcggacgtattaggggatggatcggatggtggtaccgatgacttttcccaggatgtgagcgacgattatgcgatactatcgacatctgcaaaaagagacattctcatagaactccacccaagccccctgaatatcttcaagttgtggcaggcatttctcgagaatgtgaacccactcaccaaaattatacatgccccaactgtgcaacaacaaattttggacgccatgagtgatctaccaggagtaagccgggaggtcgaagcattgatgttcgcaatatactgcatagcgttgatttccttgcaagcagaagatgtcgagaagtcattcggagaaagcaagaaagccctcctatcaaggtgcagacgaggagcgcaactcgccttcaagaatgcatcgcttcttcgcacatcaagctcagtggttctccaggcgttcatgctatatttagtatgtctacatttcttgagatctaatccctttctaacgatgtttagctctgcatgcgctcgttctctgacccacatactgtctggacattatgtggcattgcagtaagaatcgcgcaacgaattgggattcaccgtgacggggctgcacacggactttcagtattcgaaaccgagatgcgtcgtcgcatctggttccagctcatgatcatagatggcacatctgcacagttctgtggtgtagcagcatcgccgctcccaaccacaatcgatgtccaaccaccaatgaatgcaaatgatagtgacctcgatcctcgcatgacagagccagcctatgagaagccaggaccgacagaaatgatgttcgttctggctcggagtgcatttggaaaatggctctttcgtgtgtcaagccaggctgagaattctaatactgggccatgggccttcttatcatcgtcatcgatgcccttgaaggacaaggacaaagcaattgatagactggaagcacacatggaagatacgttctttcgacactgcgataaatccatcccgctacatatagcaacgacaatgatggcgcgttcagctatatactatacccggctgatggcacaccatcctcgtctatacaaggatcccaacaacatctcccaggcagagagaaggatcatcatcgagaattccctcaagatgatagagtatgctgactacgcccaaaacaatccagtcgtacggaaatactcgtggcacatggtgaatcacatgccatgggacgccatcatattcatgctcacggggatgcggcactggactgattccgaggagaaagacaaagtctggcaattgattggaaatgtgtactctgggcatattggaacgatgggcaagaacgccccaacacctcttcacatggccattgagaatttaattgtcaagacctggcggaagtacattgacgagtgtaacctcaaccaccgcacaccaacgccttgtccaaccatcgttgaatccttgctagccaaagcagcaggaatttctagtttgcaacaggaagatgaaaacttagaagctgtcgagcgaggtgttaggccacaagatcaatccaggcacgaccgttctagttcacaatttggactagatgccgaaaacttcgacttcctgcttgatgatggcccgaagacttggaatgattgggacaatcttctcggcaacttcgaaggttcttttgcagatgatgcaacatatttgtcgtgacatacgacgctgattgctcaaagttcgtacacccaccatttctagcgaatcaagatgtatggcagcaatcatcgtattcgaaatccaggtggaccccaagttggagagtcttgcgtgccaaggtacaccgagcatatagtaaatgcgatattttacgaccttatgtctcaacagccaacgctgttattttatttctgtacttgtcgatagctattgataagcatttttagtaatatatctcaatttctaataaataagaaaatgtaatgttatagtcaaaatatatgtacgatgctatgagctaagaatatatatatcctcatcactacacagttcattcaagtttccgaattccataaagtggatagatataatatgaaaagcattagtccacaagaaaaagtcaataatagctacatgtagatagttagtgggtgttgcgatatcatcttagcattactatgtcttagtgtctagctcgcatgtgagatacgtcatatgaaaagcttcattttcacctgctaagttgaactaggtaactattgactactccgtagttaacaagttcgataacagtttgcttattaagtctctgatttggagtcccagtctaagatcatcttgaaaacgaggcgctggtcggtatacatcttcgaactcgcgccgatcggcatgcgacgctccgatgcctccacgtgtcttggcgtctgcgatcctcggggtcggcgactaaacagccgaccagcgatgatcatcaacattttttggagtcatgtctttacacagcgctggtatgtgcttgatcaaatttctatttaaagtcgcgttccgcgcggtgccgattttgaatatgactaccaatttcccacctgcaatcgcctgagcacggtattctgccatcaattccacctacaaaacccccaaagatcgttccaagatgaaacccaaaacggatgttctcattgttggcgcaggcccaactggccttgtccttgctctgtggcttcaccatcaaggtgtcaatgtccacattttcgaccaggcggaggccccggcgcagaactcacgagcgatcattgtccatgcgcgcatagtcgagctgtatagacaacttggattgagcgaagacttgctgaaacttgggtacaagctgccggccacgaatctctgggtttataggcagcacaaagcgcacgtcccgctggaagacttcggtcgcgatttgactccgtacccgttcatgctcagcgtaccgcaagacgaccacgaaaggatgctcgaaaagcgactgaatgacgtgggcatccatgtcgagcgagggtcgaagttgcaaggctttgtggaccacgggtctagcatcactgccaccttgttccgcgaatctgatggcagctcaaccacacacgaagcatcgtacatagtgggctgtgatggggcgcactcggttgttcgccacgggattggtgccaaattcgagggcgaaacgtacaaaccgctgttctatatcgccgacgtcgaaggcaaaagcgagaagcatttcaacggcgaagggaacgtggtgttcaccaacgacactttcaacctggttgtcccgtacaacaaagccggccatgtgcgattggttggtattatcatgccggatgaaaacgacaatgacaactctgaatcgctagtacatcagcaccagatcacgttcgacgacgttcgaccccagatcatgcaagccatggatatcgatatcaccaaggtcaactggttctccacctatcgcagtcaccaccgtgtggccgacaaattccgcagcaatcgggcattccttgttggggatgcggctcacatccacagcccagtcggcgggcagggcatgaataccggtatcatggacgcgatcaatttggcgtggaagctcgcaacggtcctaaagcagacaaacatgagcgaggatgcacaaaaccagcttttggattcatatgagaacgaacgccgctcattcgctatgatgatagtcaagtccaccgacgcgggctttaccacgttgacgtcaaaaggaatcttcccacacattcttcgaaattggctgattccgtaccttgtgccactgctcttgaaacttgattttgcccggactagaatcttccgcggtgcttctcagctcgtttgccactataggggcagcagtctttctcagactggagaaggggccgtgcagcctggcgaccgtctcccatgggctgcaatcaacgaggtggataacttttcaactctgcgagaagtctgttggcagctccatatctatggcgaatccctaccacaaattgaaaagtgggcccaacagacgagtgtgaaggtcttcgtctttccctggcaggatcaatatgccaatgctgggctgatcgagaatgccgtttacttgctgcgacctgatcagtacattgcagggattttcaaggacccctctgttgaggggctgaacgagtactttgctactcgggggttgtacctaggtcgagactagactgtaaataccagctctctccactatccagttcatcagcttgtaccctgagaccacgtgcattgccctcgcatgttaccggtaatttcccgtttgagatgcggaatatcatgtacatttccaatctagtcgactcccgaagtgcaccaagtcacagcttgtgaacgggacatgggggccacatggtctgcacacccctacggcatgccagagaaccggagtgtgattggtgacttggcacatattaaagcccgttgacgcccgctgtgattggtgtacctgtggggctaaccatgttcccctactggggtgggtctgtgggagaccccacctatactttcgcagggcattctccccggcactcgttctatgtggcatccaatctgtatacgacaattgataattaccgacagcctccgagttgtttcaaactccacctatgttgtgtcgggcatagtcgcttacaccgttgatcggccgctgagaactccccgggtgaacatgtggcagcgacggcggcttctcatttgctcgagcgtctaattccaggtacagggctcgaatgccaagcgtctctcctgatgcattggcatgtagggagggagatataaaagccttgcgaccaccgagggaaatgatcttcgtactcacctcagtccatctctctctaccacacttcccggcacgatgaagaccaccgctctcatttccctgatcggcctgtccggcaccgctctcggtgccgctgtggacaagcataccagcacccccttcggctacaagcctggctccaaggagtccattgccaacatgaaggacaagattgagaacgttgtctggatccttctcgaaaaccgtggatttgacaacattctgggtggagtcaagaagcagggtctgaccaacgttgtcaacaacggtcctttctacaacctgcagaatgtcagcgacccccacagcaccaagtggcccagccagtacaagaactacgactcggtgatcaacgatcccgatcactcgctcactggtaccaacttcgagctcttcggccagtacaaccctgacaatgccgccattgccaacggtactttgacccccaacctgtctggctttgtcgagcgtcacatgctcgcccaccctaagatctctgcccagcgtgctgctgacgaggtcttgggatactactccgagagccagatccccaccattgttgacatggttgatgagttcaccaccttcaacaactggcactcttgtgtccctggtgtaagtaccttccgtggtgcacattaaacaaacatcaaactgaccatcaattagcctaccaaccctaaccgtctctgtgcggtctccggtttcaccgatggccacggaaagaacgacaatgatttcgatgtctccgccatcgagaccggcagcatcttccagactgcctctgagaagggcatctcgtggctcaactacgacggtaccaacggtgccttcctccccgatgccatgttcttcgactggaccgcgaagaacgccaagagcaacgtcgttcccctcgagaacttctaccaggacgcctacttgggcgtcctcccccagttgtcctacatcaacccctcctgctgtggcctgaacaccaactccatgcacccctccggcaacatctcctacggtgaggtgttcatcaagcagatctacgacgccgtccgcaccggtccccagtgggacaagacccttctcctcgtcaccttcgatgagactggtggattcttcgatcacgttgcccctccccttgccgtccgccccgacaacaagacctacaccgagaaggcctacgatggcagctcttacactttcagcttcgaccgtctcggtggccgtatccctacctggttgctctctccttacactcccaagggccacgtcgagggatacggtaccgaccccgccaccggcaagactacctcttacagtgctacctccgtgctcaagaccctcggtctcctgtgggatcttgaggacagcagccctcgtgttcagcactctccctctttcgatcacctcattggacctcgcattcgctcttctccgaagacccttgcgaacccccacatcttccccactgatgtttaagaggtgctcctacagagtggcactggcttgatgagattaatcttccgcaagttggagcttatagacacgcgctgcagattttgcagccgattttctactagtctggttgtttctagttgtttgagtacagtcaaaatataatacaaaaaaaatgtttttaacttcttttcaacttctttcaagtgtctttccagatgttcttagttatatgtctcttgggataataagccgaaaattatagagcatggtgaaaagcacaactcggacaaggctgttagttcagagaaagttcagcaggaatcagctactatattttgatcagtatctcagcttttctatgccattcttggccaatttcttagtttggccgagtggagtggggggattatttaaccccgacacgattcggcagaataacttggctttgtatacatacttgatccttcattgatgtgagagtaaatgtcttgaactccccttgaagctctttcgcaatcaattctagagtacaagttattttatcatagaacacagcgaaaattcaagagagaaatatgcaaaatatacaaaagtccggatttgtgcctaaggcatcaaccctaaacccaattgagccgtcgatctggagattctcgaattccgctccgagttgacaatcaatgaccaatcttccctacgagttctcctcacccacagcttcacaacaatcaaaatgccttctcctataagattggccaatgggctcctaacccgagccacccgcaatatcaccctcgaatccgcctcaacacaacgcatcctccctctcctccgaagcaacaccgcaccacaatgcagagcctacacccaagcacagcgtccacgatgcgaccaaaacatgcgcgccatggtctccacacagaacaaattctcaacctccgccttccgagcaggccccaagacaatgggccagatgcgccagcgcaactcgaccggcccgttctcgtggaaggccgcactgctcttcgtcttgaccggcgccggcatgatgctgtatttccgtgttgagaaggcgcgtctggagcgcaagcgcatgacggagatgagcaagggcgttggcaagccgaaggttggcggtccgttcgtgttgaaggatcttgacgggaaggagtttacggcggaggacttgaagggcaaatacagctttgtgagttaatccggaggatggaatagagagcatcaatggattcaatggattcaatggatttgacatgttggaacggtactcgctaacacgatctcgctttatttcttcaggtctacttcggcttcactcactgccctgatatctgccccgacgagctggacaagatggccgagattatcgagaaggtcaaggctgctaccggggatgagaagatcttcatgcccgttttcatcacctgcgatcccgtccgtgatacgcctgaggtgctgcgcgagtatctgaaggagttccacactggcatcgtcggcttgactggtacctacgatcagatcaagcacgtgtgcaagcagtaccgtgtgtactttagtactccccgggatgtgaagcccggcgaggattacctcgtggaccacagtatctacttttatctgatgggtgagtgctgataagaccttatacataaacgtatgctaacctttatcatagaccccgacaatgacttcgtcgagtgtatcggccgacaggatacccccgagtctgcatccaaggtgatcctggagcacatcaatgactggaagagagaggggaagccactcaagacggagtaagagtctcgcgtcaggtgtatgtatggaaattgtacaatagaatcattcgaatatctgaataccctactcacgccggaaccgtgtcccaatgttcccgtttttcgtgcttttgctcgtatactcgggtattgcggccaagatccgtcgaatatagaggcccagaaaccaattagttttaggttggatgccacctgtaaaagataaaatcagcattacccacaagccacactcgagaataccaccaaccagccaccaaaaacatccctaagcccccaaaaccctcccctcagcatccctctccgcattagccctccactccatccccccatcaacaaactcctccctcttccaaatctccgccttctccttacaagcctccaacacctcctcaccagccctccacgccgcaccccgatgtcccgcactaacagcaatagcaatcgaagcctccccaatcggcactgtcccaagcctgtgcgcaatactcacgccctccagcccatgcgtcttcaccgcggcctcggcgatccccgctagcgtcttcagcgccagaggcgggtacgctgtgtagctgagctgcgagacggagcggccttcgaaggtgtcgcgcgtcgtgccgaggaagaggatgttggcgccggcggcgggtgaagatgtttgggataggtaggtggttgcgtcgagggtgttgtaggttagtgttatgtggatgttttgtgttgtggagttgtgggtgcgtgggtaggtttttgggtcgaggtgagctgggaggggggttgggtcttgggatggcattttgggcgcgttgatttgggagttcggtataactgggttgaggaaatgttgtttcaattgtggttggaattggcgttggagttggagctgggctgttctgttccccctcgatgcttatctgctgcggggaccggataagaagtgtcccccgatttgcggagagcaagtcgtgggagttgacagcttgtctatgttggttctgtaatctggattctatgcttggatgtgttcacgtctcttcatttcaggaaacagtctaggtacaatttatagagtatgcggaaaatggcttgccttgtggccatcctcagctctcatatcaaacgagcaatacaacagcctcaaagggccgaagtgtccacttctcaccggagaatcgcttggaagcctcctcaacaccttcataagtattgagcaagacctccttcacgctggtgataccgttgctcgccgcatcccactctagagtcttgtctgtccagtggcacacaaccaaggctttttgatcgccatactggcgagtgtacgcaaagacctcctggcttggcttgtccagaagtgtgaaatcgccatacacaaagatatcaaggtacttcttgcgcagcttcagcacagtcgcccagtaatggtatgttgagttggggtccttgatttccgcctcggcattgacccgcacataatcggtgttgatagacatccagggcttgacgccaggtccggtgaagccggcattctcagcagcggaccactggaccggggtgcgtccgttgtcgcgagacttcttctgatattcttgcagggcaattgcttgggcagcaaggtcgtccttgggtattctgtagaatactgtcagctaacgtccacgagttgcactaggaaagtgtcattaccttttccagtggttcagacaatcaatgtctttgtattcttcaataccccattccttgggcacatttcgggttcctatttcctgtccctggtaaacaaacggagtaccagcctgcaatgccagcgcagtagccagcatcttcgacgcgaccagtcgatactcctcactcgcatgcgcgaagcggtcaatagagcgtggctggtcatgattctcccagtagagcgcattccagccatcattggcatacataaaggtctgccaccgctcaaagaagtccttcaagtcagtgagttgccagctgccaggttcaaacttatcaagcttgccatggtccaggtcaacatgttcgaaattgaagatcatattgatctcatggcggtcgaattgcaccgcacgcagcacttccttctcgtcggtgacgaacggcatctcacccacgctgaaggcatcgtactcctggagaatcttgcccagatcctggaggtactcgtgcaagcgcgggccgttggcataccacttgtcgccccactgccagggtgtccgcgggtccttgatgggtccgtcggggaatctctggtccttgctaatgaagttgatcacgtccatgcggaacccgtcgcagcccttgtcgagccagaaccgcatgatatcgtgcacggctttgcggacaggcgggtgttcccagttgagatcgggctgctcgactgcgtacaggtgcaggtagtattcttgggtctgctcgtcccattgccaggcgctgcctatagtcttcattagatggatgtaattaaccgacgatgataaagtacgtaccctggaaatgagagacccagttgttgggaggctggcggttgccttgttcgtcgtacttagccggcttccagatgtaccagttacggtactcgttatccttggagctgcgcgcctgcttgaaccattcatgctgatcgctggtgtggttgacgaccagatccatgaggagcttcagaccccgctcatggcatccggaaatcaatttttcaacatcttcaactgtaccgtactcatcggcaatgctgtagtagtcggagatatcatagcccatgtccacctgcggggatttatacgatggacatagccagacgatatccacggcgaggttcttgatgtagtccagcttggaaatgataccggggatatcaccgataccatcatcatttgaatccttgaaggatgcaggccagatctggtatacggagctctctttccaccaggcacggtggttggagtttcctggtgtagccatggcggtttgaatgcggatgacaattaagagatgagattaggatattccgagagggagaagagggatttgggattctggagcactgctggctatatatatgtgttatttgctgtaagagatgtgttgttaaggtcacttgaagcatgtcccaccgtggggcagatgcggacaattatcggggtcctcagcgtttgatatgttctatgtcggcccgagatcccctcaacgattgatacgtcgtatgtcggcccgagatctctcgacaggggtgagccgacggagtactctgcatgggttgaatcagaagccaaactgctgtggatcgtctccacctagatgacatgggactaacgatgatgcaactggactggatgggttcttggcggaccatctgattcatataaattgataatgagaagtagaagtatagttacttgttaagacatcaagtaaactactgtttccgaattgaaaattgcactgcatacttccatcatacgatctacaatctctacatagatctcaacatcattgcatggtacaaattcccacctagcgggctttacgttgaattccaagcattgaattgagcaagtctgccttatagggactaatccgggaggtttctggaatcctgtgaatgttacatgttcgccttgagtcggttgatagaaaattgggggttattttcgtcaattcagctagatctccaagccgttctcaaaacatccggagaacgaatgcatatagaatgcagggcaagccttcagaaacgccgctatacctcagacgagtagaaacgagtcaagacgaggtagaaatataaagagacgagatagaaacggcgaatctcaaggcggtgtgacggtaaatatagcggaatcgaggtaaatcgagagcggtggattggccatgttatcgttatcgtagcttcgattattccatctccggcttttgtaggcgatcctttcgctcagttctccttttaaatgctcatcaaccatggcgcctccgtaccggaatgacaggttttcttctggctcatctaaccgaccgttcccttcgcgaaatgatcgcgatggccgcatgtatgatgatcgatcccggtctcgctcgcctggtaagcttctccccgcacgtcaatggtgttaagcccatagacgccttcggcacgggcccaatttctccacatggtattgaatcgtggctaactttattgtcatttgaatcgatgaataaaggtggtgcacgctcccctcctcgaagactagcggccgacagcagactcgagtaccccagagaccgagaatctggacaaggctaccgaggccatgatcgagatgataatcgccgtcgaacctcgcgctcttctcctcataggggcagaaacgcgtacaaagaccgcgatcgagagggttatcgaagcgcgagcggcaatcgaagccgaagtcgcagccctcgtcgaggtcagccgaatatgggacaggtgagccgagaagtgatgatggatggacttccggtggacatgaccgaagaagatgtgagtcattaaatcaatgccctgatcaggcgttaaatatctccatcgccgaggacaaatactgacaatgcgctctatcatgtgcaattagatcgcgactgaactcagcaatgcctatcatactgacggcctggaagatattcgagttattcgtgaccgacaaacgagtatgtgaaagaaacagaccatttgcaaacatgcgcatcgttttaacctgatattgtgtccaacagagttgtcgcggcaactagggttcctgcgattttccacgattgacgcatcacgcgaatttgtcgaacgcaatcatccttccatctttttctacggtcccacaaacgaccgtagtactcaagttcgcatagcttacagccgtgagagagaagaccgagctcgcgcaaaaggtgcgagtgactggaactgcagaaaggtaagttaacgtggtggggacaggaaacatgctttcctaccccagacgtacgcaattactgttactgttctgtgcttaccaaaccagtgtctcgttctcaacttttccacacgtccacactgtttcaagtgcggtaacccacgacccggtacgtataccatcctccacccctcaattctcatcaacactaatcatcctcgcagatatggataacggtcccccaggagttccgattcctaagatagctaatgatggtgacaatgatgtcgctcctgagagccagccttcccaattcttgctgatccgtggtctggaggcgtctgtcacagaggagcttcttgccaaaggagtttctaaactctatcggccggctgtcaacaatgacagcgccactgacaatcaaaagaagggatcgaagatagcatcgaccactggtgacagcaacttgggagctcgcgaaggctctctccgccgcgtgctccttgtacgtgatcgcagaaccaatgaaagctggcgttacggattcgcagaattcgcgggaatcaatgtacggttatcattcatctctcatattgtttcctcttctaacgcttgacatttcaggatgcacaagctgccatgacgagactcaagtctttcgaaaagtttaccatctcctcaaagccggtgttggtcacctacattcacggtggagtttttgttccagtcatgaacgcctcatccagtgctagtcacttcacattcagcccatctaacaacccatcgctgaagttgatgtactgggatgatgcagcatacgtgaaggaactcgtgctgtcaacagaggaagacgatcctgtagccaacaagacaacttccaaccatggagacgtccaagccaagggcacgaaggacgataaaggcaaaaagagaaaagccgatggcccgcctatttcgaaccccaagaagcttgcaatgccatcccagctccaattctggagtgaccgccacgctgagctacatgggattaacagaaatgatgccggaaaccccgcagagggctcgacctccgcaactctggcgactgactcggccgctccaccagctccatcattcgcagactacaaccagaaccgctgcctcctgtgcatgcagcagcttgtggatgcgggtcatctcagataccacgagcgcactagtgatatccacagcgaaaacctaaaggatgtcaaattgagggaactcggcgtatgctggttgatgatctatggtatcgtgccgttgcctactccgaactatcaagacagcaaagacgaatatcgtgacggacttgaacaagaatactccatccctccatccgctcgatcctttgcagacctgaatcggaactggtgcctgttgtgcttcagcaagtttgatactccggcagaggtcctcgtgcatgaccgcgtcagtgaataccaccgaaaggaattgaaagatgaagaggcggtgaagtggggcttgaacaagcttaaagaggcggatatcgcgcaggatatcgcgccggcggctccagaatatagagaccgcgcaaaggagcgtcggaaggcgttcggacgtaacgatgccaatgcccgcccgagaccctctgaaccagaggaagaggacgagacacccgttcagacatcctcgatcggcgcctctcttctcagcaagatgggttggtcggaaggatctggccttggtgctcaaggaactggtgtgactgcgccaattgctacagaaatctatgcccagggcgtcggactgggtgcgcaaggaggtcgactgggcgatgcaaccgaggaagctggtcggaacactcggggacggtacgatgaattcctggagaagaccaagaacgccgcacgccagcgctacgaggagatggaccgatcttgatcaattcaagacggttgaatgtacaatagggtggaagtggtgggggtggttgggatatgaattgaaagtgagggggagatatctgatgttcaccttgtgccataactgggcagccgattccatgtatgattacgacaactaatgaacttgtacgatgttcctaggtagttgatttcctctgccacttcttggctatccctttccgctttagtgctcaggctttgccgctttttgctccctgaattccaaaaagcgctcatgagtcgtagtaaaagggaataacttggccaagtcggttaataggccttggcatctcggtcttttccgttcctctctccttccacttaaccgcgcaaccacacatctcacctgcaaaaatggatgagctccgtaatagacttgacagtcactggactggtgcccatgtggctaatttgaaatccaggaccatgttgcctggtagggggaatagggacacgttgacagtttgcgagctgttgagcgaaccgtgggcttttgactctgtggcgttttaatgaggataatatcctcgtgtgcccctatttctacctttcaactgacaaacttttccaacttctagtcattctttttttggatattgttgttttaaatcactttctttgcatcatcagtcactccttaaaactgttcgattgagcaaaagaatacgacaatcaaagatgatgcgcttcgtgatttctctggtcgtctcgctcgcttcgcttgtcgctgccattgaaatcaccagtcccgctgcgaacacgacctacgcagccgggtccaccgtcaacgtcgagtggactagcgttgataccgatcctaccaacttcagtctttatctctggaactttgtctcctggcctccatcttatgttccgctggccatcgacgtccccacgtcggatctgtcttactctgtccaaatcccctgcgagaccacccccgactggggttaccaaatcagtggtatcaacggcacgaacgtctacatcatctacgcgcagggtgagaagttcaccgtcgacaatgccgacaacagcaccgcctgcgtggacactcctttgccgactacatccatctgccccaacgctgcggcatctaccgtctatgtcacggtgagctctactcccagctcccgtcctttccatcatccatcccacgcccatcatctatcccacgtccatccttctccatcacccagcactgccagcatcttgacctctggatatacaaagcctggaattgtgcctaagactataggttggtgctcagactattcccaccctgtaaccttggacaaggttcccgccccgactccgactctttcggctcccaacgatacaaatggatctgatgcttctccggtcttcactgcggcactggaccaggtcactgattcccctggcatcctcacattgactatcactaacactgcgaccgtgctggcttgcccgaacgtgcacacaatttgatggaagtttatccgagcaaccggtgaccagtccacttctttatgtcgatgtatgttatgtagtaccgaacgagaaggaatttatacatagtagatcgaaatcaatttcccccttgtactttttaattgtttctcaaattctgactacattgagctgctcactgagcttgagcccggtctgagctttactcgctgagtcggactctgagcgccctcataaaagcggcggcagccaatataggaaagccctacccggcaggggaaacactacgtagagttacctaggtagtcatgctggcacccattcgggtgtctttccctttccattgtaatcggcaagccatgccgagtaaataaataatgtacagctggtatcaaatcatgagtagagtgtagtgagtgtagttggtatgtgcaagtaatttttgcagagtccttcctcagttctctttcgtatcctggttctcacggaacgccctcttcatcttctccttctccaactgcttctcaaacttatcaccgaggatcttagcaacccactcagtaacgtccttctcaagctcctcatcactcttcacaggcgtatcactaccaccctgcaacccgttccgcacgaatctccgcatatcctctagcccattaatattcaaagcatacccgaccgcaccgcccgccatcaacccaaacgagatcacattgagcgtagccaaattcagagcctcgaatgcgtcgcccgcggagttcgcgtgcggctggtggtacaccgagcttgtgtggaaaggcgggatgcacgcgatgcgtttcttattgaaggagcggcgtgtgattaataccgacagcgcgaagaacgtcattcctccgaagaaaagtttgaggtttgtgtttgtttgcggtgagggtggttgcgctacttgtgtttgggctggtggtgatgggttggcgggttgatcgggtgtcgccttgtcttgaggtgttggttggggagtctcgggttttgggcttgagccccagccgaatagtgataccatttttatgcgcggggtgtgtgagggcgagggttgtttggttggtgatgcgaatgcgaggcggagctgaataagctggaaaaggatgaaagtcgaaggatcgggagttgtagaattcaacagagaggatgactgggtatgatatttttccgcgaagataactcgaagcactgtatctgtgtggggttgtcttgctgttctcgtgaatgaagcaaatccgcgcggaggatatggcggatgtgcacgtgacccggttctcatcgaaggttccaaagttgactgccttcacgttacgacaattttgtggaaatttgactcatacttcggtgaaatgatgccgttgctttcagatagacagcacgcacaggaatatcccgttccggaactatacgaagcaatgaatggctacatcttagatgaggccgaatgagaatggaagtttttagggctagagcgtcggctggctcgggttctgtcgtccttgtgcaagtaagtcagatggaaactgtcgaccaggctgtcattaaacaaattatcttctctatgtatcatcaaagcataacgccaatcaaatcggaagtatgtaaggtatgcaaaaacaccgtggatgcaactgtcagaataacaatagcagaaaccgaaatccattcaaaccatttcaaaaagcattctcatatgttcataattcagcgcgcttcgtcaatatactgtgctcatagaaaaaaagtaaatcatagtaacatcataatagatgcaatccaaatcgtcaggaaattaattcatatcgccggtggtgataagcatatcagcgcgaccaggccgatggaaccgatcaataccaagatgctccttgccatcacgaccgacataaatgccaaagccgtacaaaggcaggtggcgctccgagggtggagcaacaataagacgagtaacgaggtcagtcttgctcctgggctcgcgcaagattttatcagacagaagaggcgactggtaaagatagctcatcagatcagccaaggttgtgatatcgtgtgggagatagcgacgacggcccggccagattgctatgaaagatacggcatataggccacagaaggcaatcaaagcgtagaatgctggcaaataggcagcgatgcggatctggtcgtggtcggagaaccagagggcgatgaagacgcctccggcgagaatggggatggcgagagatagcaggctcatgagggagatccaggcaactttgaagtggcggttgattatggcctggatggtgacctggaatgggtaggaggatgggtaggagagtaggatgctccgttcggcagatgcgccgctgggggatgagagttcggcgtatggttggagagctcggaagtatacgtcgacaggttgccaggccaggaagaagacgtttccgattagtgcggggataaagctgtataggaagttggaggaggagaatgcacttgtcgatgggagtgttggtagcttgggagggaagccgccttcgatggcgctgttgataaagctaacggcgacaaaagcgacgaagagggcgaagacaatgagagtccaaataaatactgggacgttgcgcagaaaccaaggtgtccagcgataacgggtggatggcgagtataggtggtgatcttgttcttgtgggtcattggcgaatgcaccgttgtgctcaagatcaaagcgaaccttggtaactccgtgtggttgatcttctcggcttttgcctgtctgatggagagatggggtgcgcactggggcatctacttcgccgattccgtagaagatctcggccttgctcgagagtttccagtatcccagtcgaagtactcgggggtcgagggattctcgcaccgaaggaactgtttcagagtgctcaaaatcgtggaggatattcgatcgctgtatgatcgagaccaaatctgcgaggctgacgggatcccacatcaagccagacgagccacgaaggaaacggatgaaaagcatgatcaggcctagtgtcaaaacaccatataatcccaccaatgtccagcccacggattgaaccgaagcccatcgccagacaccttgtccgtcaatgatatagtactttgcctggaagagacagctgagcagagggatggcgaagaaattcgaaagccaaattgtgaacaaagagaatccgaacaaggcttcaccatggcggaaatgggagaagtcggggaaaatgaagttctgcgagagaataggcaggcggttcatcaccagaccttgccctcgctctgctgacatcatagaaaatggtgcgatgcgatataccgcagcttgaatgacgaataaccatatgatgatgattgcggcagctatctgtggcaggaactgtagcacaaaatatctcgagtcgccttgacgcacgtagttccacaatccctcttcaccacgggaccaaacattgcaaaacactatacccgctatcatgagcagacagcaaaatatcgtgagcgccaaagcccacggccgcagaacaagaggcagatagtccaagggaggatacaacatgctcttctccggcgcatcaacagccatgaaggactcggggtccactgacattggcgtttgcggcaaagcctgtggtgagggagatgtataggacggtctcactggtggcgtgtcatgtcgaatgggggtccgcgtgcgggtgaaataaccgagtccctcgtcccatataagtctatcggttggatagtcacctgtcgtcgtggtggaaatagagtcattcctttggagcccccgagttctgtcttgggtgatctggtcgattgcaaaccggacgtatggggagtcatctgtgcctggagtcggagatggtcccgggtaatcactgggggatcggcgagaagtcccgtttgatcttgatccatcggatgtgggactgatgtgggccgctctgtcgtctacgaaccgaactgtgctggatgttggtgggcgttgggactcgcgatcttcttgggcaagctgtatttgcgacatggcgggtgatggtgcgtgggagtctggagtcctgaatcgcatggctgttgctagactctccggactagaggttcgttctgagaatgaatagtagtcgtctgatgcagccacggactgttgagattctgatcgggcaagttgcggtttgcttgctatataaggatcagttgacttgacttctggaagttgtgtaatgtctgtagttaaaaagacaacggggcaggggttcttatatgcacgtactgttaacgctgcgcaggctgaagtttctcgcctggttcatcatgctggctggatattgatcccacgcgcaacggtaattaatctagaagcattcctcgactcccttgagatacgaagggatttttcgagggccagcaatcgctgcccagcgggattttgtctgccatagtgctgggtgacgtctcccagccaccccagccacacacgctgagatttgcactcaacaaaccaataaggatgaattaaattgaagagttgaaactcaggcactattcatttgatgaatcatactagaaattccatcgaattaaaagttgaggaagagttacggaggtggttgagttgtttcgcggcccgatcaccagcacatccatcgcctaaagcttggccttttatctctccaggtctcaccaagtctcacacccgatcacctttcttttcaattttccaatttcaagaggtcaatttccacggtaaccatatcaaagccctatagttcttcttgaaggacgccccagaactacaatgtaaccatccggactctgcctcgcatctacaattgccacactggagccccaaggcaataattgccaacaattgctgctctagatagcagctatacgcaataaaaaagcagggtgtgttcaaaaatttgtcaatggttgcagcccactaacgcagcgtggtgttgcaattgttgttctcccttgcaggtataagtggctggaactagggcttcacggtccgccgagcacatgaaaacataaggctgtatctagggcagtatgaaacatgatcgagggcaattgtgtctattagacaatgtttaggatacgcatatctgtcttattcaaatgaagatttctgggttctcgttcggttatggataaacacgctcagaaaatcctgacatatgaatagttggtccaagggacttagaaatcgagaaacagagagatgaacatgactaatttttccgtttgttattaggtgctggatttgaaatcgtctgcctcttactctgtacaacaaatagttatatgtgcttccccggttctgtttgaagcttgccatataccaattaggtgtactccgtaggcacgttcaattccgattggtggcctcgtcattttatttggtacgttgtaaattcgcaccatgtcctgggactcttcaagagatgatactaccatcctctatttgattctattgatgctataagcaggccgaggttattgattccctacgctctgtgactccatttgatggcaatctaccattcttgatctcgaggccaattcttaacacattcaatgtgaaattattcttatttctcggccattatggcaaaggactctgttcatacatgtcatgtcagtaagaggtaaatctggcaaacttgagagtcgattagcacggaggaaagggaagcaggacttgcgcagattgccagcacctccaatcccgattctaacatagcgctcttgaaaaccagacgtcgaccgagtatcctgagccccattgagcctagaactctgcgctgactgtgactggagaagagctactccgtctaaggtttctaagggcagttgcccttcgtcgtcctcggatttctgccgttttggccaactgagaaacctccataggcagcgcatggttttcaaccggaggaatgagtaaacaaccttggtcgagggtttatcaaatcagtactctggctcttaatgtcttgatagattttacttacgattgcttcaaggcttcgaccaacttcaaatgatctttgcataaccctgtctcgtccgggaataatagctagttatacgcctagctagccggtccctttccgtgatgcaacgggttacgcagaacgaacactgtacgaccatgaacttcaaatttcccggaacagccagactggctaccgtttattgatataggatgatataagaggaaactatgacatatcagtatatgataatttagccaccaccaggagataagtcagtcatacatttgagatggagtaacgcattcactatgtgtgacaatatatgcctgcagtttttgcacgattcactaaagcctctaaagcctctagagaccaatttgaacaaaggctttgtcaaaatggagaaaatctggaggacttttattctatctacctcaaaaaagatcaccgttgatatacttctatttcattctaaagcagtatcttggggatcaaatgatctagtggtgtgtccaggttgcaatggtcacacgactgtgacgcgatagtgaaaccccattaggaactattggtccatgtggtcacaagcttaaggttaatgacctgaagatatcaactgcattcggagagagcctatgtagtaccttgcattagcaaaagaacggaagctgatcatgatcaaagatgatcaaccttatctggtctccaacaaatagaatgacgtttggatatccagttagggatttgaggtggacctgtttcatattttttaaaaaaggtgggactgtgggcctccgacggtgatactgagagtccggagttcaggcccaagcgtttccggggctaaatatcccggctgatagcaaaaactgctgtgccgcgttagtgggtcagacggtggcgagattgcgagcaatgtttgaagggtgtgcctatggatcgcaatatatggcgtatcgtatggacacattttagaaacacagatcttgtttcatatgaataagatgaggcttctgaaaccatgtacatattggctctttgaagaccctaattcgaaaggagaaatgagcttcagtcacttggtaagaaaagcaggacccaatcgaacacggcagagaaaaagtcgtgtttcctaaggatttaagaagttggcaaaatagccagcgggaatagccaatgatcttgcaccagccccgattgctccgacggccttggcaaccccgaagtggcacttcaaccgcgaagggcgaatgagaaggcagaacagctctgcgccaacgtccccggcattccagaggggaaccgtgcagcggggcaaattatttagcctcgcgtttagatgttcaaaggattggaggaggaggtcaagagagaatagaaagcttgatatgaggaatgacagagtaatgtacagagtagataggagggagtacgtatgttgtagaaataaagtggcatcatctgactgctgcctgaggccagaaatccaaacctcctcctctctccgcagattctctggtttatctgcgctcctcgtcattcctttattctttttgagtccgtcgattcttttgcttctttgaatttccgtcgactcttaaattcttggctttcccctcatttgcttcttctttaccccttctttgctcagaaagcttttatttcgatcccgggttcagatgtccccagccaatgtggtgttagaacctcagctcttgcgtcgcgtgtgccattaggccatttaaaaaataatcacttgttttgtccctatcggatttctcctctggcctggaaaagagaaggtcggcttcttagggtctcccctcatcatgttgctcaaacccgcgacacccctcaccatcttgctgctgatcgcctttgcgcttttgctactctcatgtatctcaactcctattgtgaagggaattcctctagcaactttcaaagatgtcgattatggtgtctttggatattgcaagggtagtacctgtaccaatatccatgtgggatacacgagcagtaagtctcccccctgcgtgtctgcctattctccgctaagtttcatgcagatgatataagtagcacaggcgatgatttcaatctcccttccggtactcgaaagtcactgtcctcgattctcattatccatccagtcgccgccttcctgacccttatttgcctctgcctggccattgcggcccacttccatgcgccctcccactcgccgcgcttcctattggcgcttctcatcttgttgctgccaacactgctcgtgtctctcctcgcattcctcgtcgatatcttgctctttgtaccacatctaggatggggtggttggattgtgctggtcgcgaccatcatcctcacctcctgtggagtggtcacctgtgccatgcgccgaacccttgtgagtcggaaggcaaggaagcgtcggatcgcggaaaattctgagatgagtggagagaactattataaccgacagaatgccgctgcggctgcgccccctgttccggctcccattgaccccaaggaagcctttgtgtcgcactctctcaactccgactcgggcccaacattcgcatccttccacgtggaaacgcgcgacagtgatgacgatcgaacacccctcaactcgcggactcccatgagcgataccccagcacaaccggaccatcacggtgctccctatcgcggcccgcaagatgaatttggcaatatcccgcctcagggcccgggcccgtacggtgcaggtctaatgtcacggaatccctccgatccccgggttcgcccccaatattccgatggcagtatgggttctcgaagaggaggcgcgccgcctggcttcaatggacgcgggcggggtggatatcctccccggggtggacgcggtggacgcggtggacgtggaggaccttacatgggacctcctcgcggccctcctggctcccggggtggctacatggggccaaatccaggccgtggaggtcgcggtggaattatgccaccccggggaccaccagtcggctatgagtccggtccaggcggccccaaccgcggtttcgacgcatacggtcgacctgggtcgcctcccatggatgacccttatagttatgggccaccgggccagatgcaccagccacctcccgggcccattggcatggccgtgtcaccggagacggtaggccaagccattgagatgactccgcaatctcgcccgcagtacgagatgcatgagtcgactcaaccaatgagcagcgtaccgcaaacactgtcagccgaaaaccacggtgccgtccctgaaagcccgacaagcatatacagtcgaccgaagtaagtcggaatgctacgaataccgttcctaagttgaccactaacctttgttcagttcctatgatcctcctcgctcgggctggggtgcaaatgatcctcgcactgtgaccccgcagccaccgcaacaaaacaacatcagtaccaattactacgaggacgtggatccccgttttgctcgtcggccatcgcctcctactaactctgggatccccccctctctgacgcctggagctactcactgtacgtacactcacagatcacacgtgttgaaggattcttgctaactttctcctagtttgatgaaatctattggtttctaagtgttattcatgtttgacacgattctttccacatcttctatgctttgcgataccctttgcttttcttcttttctctggctaaattttgattacttttttccctccgatttcatgacacactaagtcattttggggaatggagttatggtgtccttttatcttcccattcctctataaatgctctcttttgggacgacaagacgtttcatcttgtccccaaaaatccgccacaagacacggcgttgagaatggtaattcttttcgctgctcgattgtactctgcctggacttccatgtatagcagcaggcggatacgatgtacagaaacaaattcctaagatgtctggctttatccaagatcaacagcatatgacgctgctactgatttgatcttttttgtactttcttccactgagtggactgtgacttttatcttacccgaatccatgtacatttctgttctctggtacatttgacttttcacaatttccaaacataataattagctcttctgtgatctccgcatatgattgaaatcttctctccccaaaagaaagatagccctgtaatataacatagatcgagatcttcaatcctccttgccaatcatgaatgggagtactaattcagtctgaatcgacatgagaacaagcccaatgtctctggtggcgaagatgacgacgaggtatagatgattcgtgagtggagctggcttgatgagatgagcatgttgcttcgagagaagcgtgaagttgaatgtgtacttagggtatttctagagggtctagattgtgagttgaggaaggctcaacgggattattgtctgtccgagaaggagcaggggtctaggaaaatgatagcaaggaagggacgatgaatgatatccttgttctttccaagtcatagctcaggtctggggttattcctcttttgttttgtagagttgacaggaaacagggggaacggactgcttcatcgcgatagactaggtaatcgcaaacatatcacgctcatattacatttttcatggttttagaggctctaactggcaaaatactatgtaataattctcactttgctcttactttttgatgaatctatcgaatataactttcatatcaattgtggcttactctgatacggtcttacattgtcactatatttgaagtcatagaagtgtacaaacaatataagcttatgggtattgataccaggaaaacaatggttaggctgtactaacattattctattcattttatagagtccctgaattactatttaatatactacccagcacgttgaactttcaactccttcaacaaccacgatcacattggatacctactacaacccaagaacacaacttacaaggtatgaccccttaacccatggccaagatttggtatgaaacaatgagctatttaggtctctgattacattgcaggttgagcatcatcaaccattctccaaatcacagacatagcctatccaatatcccccaaccagtgagatagacgctgtttctcatccttcaaaaacagaggctaacaagcttaaagtgaccgatattcggcccattccgtcgcccaacaatgcatagctagaacatctagcaaggctcacaagccgtgcaaatcttcgcgctcgtgagtgccgaaagatagaccaggagatatcgcggattacgagcagcaaggaagctacaatgaccgcaaatccatacttccactatactcatggaaatgtcctagcggacatggacagagaattggcgtctctctgcagcgaacttagggatatgaagaaagaagaaaaaaaagaggccatgatggaacaggaagtctggaaccagattggttgaatgagaaccaaggcgttaagagtttggctcctataatggacaatgcccttcccggctctatcctcgatattatcacgtttaccaacagtactacgcattcgtttattcattttaatattccattagtagagctgtaaggtcaatcttctatgctggaccgaagcgcatatatcgtttctagtcagtacaatgacagtacactcaatagcgctactatttccctttggggtggcattctcacagatatgggcatttctggtatagatttacctatcatgagaagtttcagctccagtcaaattatcgtatgcctatagctcgcgtttgatactgagaactgaaaagctctaacaaatgctagagctatgtgacggctggtaactacatcacacggcagtctagattgaagtaccgaaatccactatctaggcttagaccatgaacttatattgagatggtgcaatatcagtgtctgatatgtagaatacaggaaaaatccggtaccatgtcatttctgcgccacatcaacaagtccaccagaacaacttgatgagaaaaatcaccacaaggtacctgtgtactcccattcgacaaccgctcaggaaccttggaaatttattttggttactagtctccattaggaaataaagagtataaggataagagatttgttgatgtttagattactgagtatgggaataatgagattggttgtttcataatgtatgcattgcttgactatccacaatatatcggaggtttatctgttcattgcctatcaaaatgacgatctccttggccactatgagcacctttttaacttcctccaggatgttctttgaaacaacaaggaccgccagtacatgcctccatctctgttgaagtcaatgcatcggggtggcggaaagtggcaatatcatgggtgtagataagtagtaaatcgatcgtccaacgaatgctggcttcattaagtagacttttggagcgggcggcatcgactttcgttaggacatctcacaggatggagctcccagcgaaagtgcgtttgataccacgaagtcgacactgctctgaaccagtcagactatttccagactggagtttaccagcaacatctggtgagatggtatgagatatcgacaatgtatgcaaatttttcagggtcgctgcgaggatactcggggaggcacaatatacgaagaacatatcgtacagtttcaagcactgagctaccataggtagtaacttggaaccctgttcataatcagaaatcagcttagctcggggacatcgataataactggtgggtcggctgtatcaaccagccagtgcgactgagagcattctcaatttctgctcatttgttgaatttgacctattcgaaacagatccattgtgtaacggcccgatcaccttgatggaatgacaggcagagaatctgctggagaacctacattcattcttccaatccccactgcaagacactgatactgaaaggcgaggcctattggaaccccgacttgtgcgtgcgattcgaggtgtctcttcgagcatagacttgtacttgctctagctcctccagatggactggatgttcctcacttctttttcctcagcattttgtttcaatgcagttataaatgcagcacagttgtaacttactgaccaatctatagtaaatattcggactcttagtggttttatataatgaaggaaaacgggaaatgaccaaagagtaagagagcagggaagaaggattgatttctaaaagaaaaaaaaagaaacggctaactaaatagccagtggaagcctcacaaaccaggtatcaaggcatcctcaaaaaggaaaatccctagttaggtactccgtacagttcggattttcacacccaccaccacaggcttagtaaatcagttgtctctagttataactgcttcgcttcgctcctcaatgatagatatagtttgaaactgccatagcaaagccaaagttgcgagtacattctcggtcgaagcatatccagaacccagattgtcaaccccctcttcttccttctttcttcaacctctcgcacttccaataatacgcctcccaccaaaggtcagatccctcagccccatggctaagactttcggcgaaacaataaactaacagagactaatcttttgataggctaactaccttactacctccccagccagagaggtacaccccgcgatgcaccgttcttaagcgcggttaaaacataaagctaagaaggagacagtcactgatgagaggccaatcctatcaccgagcgacgagcagctataccagcttgaaatagctaaggcttcgggataacgagctcatcttcaaggaatgttgctacgggaggcgatataccaaacgggctttctcgagaatttccacatacaaccgaattgtacgacgagacccaagctgaagtgaccaccaaccatgccgtgctcaataagggagtgcgtgtgccaggcaagaaatggtacgatctgaaagatctcgggaaggaccgacggaccgtccttgcctgtattccgtccactgcgattggttccagtcctgcttcaaacccacaatccgattcccgaactgaactcgacccgaccaatcacaatggtcggccgcgacgaagcccgatagtctttcccgagagatgctccaaatcagcctcgctgatctcgaaggggaaatagtactgatgatcttactagatatactcttgggaatgtttgctatcgggactctgactctctacctacatcatggggagatacaaatttcactttacttttaccttttattaagatcatgttttaacgagcccatcaagaatcatttcgctatcaattatttacactgtatatattcaatcaatatacctagcttccaagagatcaaaatgatgagaacggggttgtggctacaagcattgactaggctttcgttcctggggcagtattcgcgcccactccttcgcgtgtttgttggaagatcccacacaagattcttctcttcttctctcaacaaccttggactgctctacatatactactgtcaccacattgcaacgactcaaggtatgaatagttggtacataaggaccatttgtggtgaaagaataatctaacattagtaatgttatggatcaaactttatcatacctttcaaggccgcaacagtcctctatcccaccctgctaaaagtgagatccacgccctcatctcgatgttgtattcctaactgtcttcagagagctgacaaagaaaagtggccgatagtcggccgattccgggcccgaacaacgggcagctggagatgctaacccagctgcgccttattcggaccacgctagctcactctcaaagaacgaaaatgcggcaggcaaggatggtaattcgccgagtacaacttctgacaagccaatgtgccgctaacggccaggcctctactcctcacgcattgtggaggctcgagcgaaggatacagtctctatttcgcaatatcctcaggttacaggctgaacaagaggctgcccgtgagtttgaagtggagatctggaggaacgtgcgataagtcaccaagtcaacgatctacagccctatagagccttgtgtggatcacaatatcaacattgaatatcggagcaatgcctctttatctttcattggttgtttacctttgaaacggatgtagaatacgagagaattcttgcattaaaaccggagagtaagctgaacgcgccttaatatgggctatctacatactccgtctttacaaagtaagtgctattgttaggtatctcagggcatttttaatgatataattgcagttcgaaaagtccgatgactctgactttgtgctccggatgaaagactgatcatgtatacattgattacgagtaccaaccaaaaccaatggatatactcctccaatatcagagcacgatttcacgaaacgattctacgcttgtcacaaatcacggcaaccctttcacctgcatcatcgatgtaaaatgccggaaacatattcttctgacactttaaagttcctcccaaagaaaaaaacccagattgaggaagtaggtgacaagcgagaaaattcctgggagatctatacgcgcgaaatcatcagcctacggtggatcatcttttacaaatttgattatattttacctctgttcgcattcttcttggcatagattgtaccctgagggcttgacatagacttacagaacccatctatcccgctctctataatgatttcgatgctttcactgtttggggcgtttttcttggcagcctgcagtttagaaggccgcattaaatctgtgattgatagggaaagatcagctgtctattggaatttaaaagataatgtgcgatatgctttcaaaggaaatgggtctgagcgaatctgtaatatttatatgcggtctactgtacgcgattgctatgctgtctctatccggagggcgcttcctcagctcaatatcagacgaattgtcgaatgtttacggatagatcattggtatggtagaaatatataattgcatatacattggtatacttggcatatctatgaactattattggacgagagcgctgtaataagaatataggatgaaattgcattaattatatagtggcctgtttgtcttatttgccttagattcggcccgaacgggggcctgaaagcccgcgcgggccgagaagtcaggcccgaagctcgacccatcgacgggccgggccgggtcggtcaaaacgggctttggagaagtctacctcaattcttctgagaccagtcctcaacaaaacgcctgtggcttgggttggcccctctgtcttgcattcaatgcaacgtgggacagggataatgccatagcagcatcttccctagacccaattttattgacccttatcgcgccaattatatttctctaagctgggtttgcctgacaaagctcttcttcctccattcgtaaaaagcaactggcttttaccctggctttcaacacaaggaaagaatataaatactataacccgagtcttccaatattcactcatcatgacaataatctatctccggttctcgaagaaccctgctcctgttgaagatattgccctcgtcaccaagactcttctaaacatcaacccaggcctagacgagaccgagcgcaccgaggataccatcaccttctcttctacagaccacgacgtcgacatctttggcgaaatcttcgaagaatggctgcattcagaacccccagtcatcacaacgtttcgaatgctggccgattcttaacggctgccgtcagcctcctgacattattcggatccgtgtcagcgtcggccctacctccccttctcgagcttacgacggactccgtggatctacagtctacatatactttcaactgttactctcctggcaaggcatgcagggggaatggggacactactggtggtgggtcttctacggagggctgcacgcccatcagtgcgaatggctgtagctagtattccttcaacggaggtgggcagttcaaactctgtgtctatgaaaacagaggatgtaccggtaacaccgttacaagtgtcaatggtggctcagtgacttgtcttggaattgaaaatgcgggtgcttataaggtgatcagaagagataccaactgctagaaaattcaggacatcaggctagccgagttccacggcaaggtgccttgcaaaaaacccatactacccgggatgagctccgtaaagcaaggatccaatgcggttacttctcgtggaatgaggagctttataggcagttttcgggtcttctacctctttgagctccaggctgtgcgttccatggctgtcagtttgatggtaaagcaatatcgtacccgacggaccacagctgtcttcgagggggttccaatgaatgatgcatggtcgtgtttggggatcatctgcagcctgagtgattgtgaaggggattttgtaaattgggtcgtccacccccacgtcagcagttgaatctccttcaattttgagcgtgaggtggagtgtgtctagtctgttctaattagtctcttttttttagtttcaagggggatcttcttacgttctgtctttcttggaatatttcacgaagggtagcaactgctgatcattgagttcttccatgtggataatttgccagacttgcgattctccgtgtcggagagttgaaagttggacacatcacatgatcatggtagggatctcggcatcagctaccatagccctgttgatgtttagattactgagtgtgggaataaaatgatcttagttgtgtattgctcaagactgtctatctgtctgttcgttccgcatgtggatcctcggccagatgcccagttccactcagtcataccccagattacttggtcatttcaacaagctccgctactatccatagagaatatatcatctatcttactgcgccttcatgaggaaggtatagatgtcactttcgaagggaaagagcgaaaccagactgatggcctcggcatttctatggtgatcttggtaatgataaatgaagccaagtaagctgcttctagtaatataatggtataacagaagggtagatctctcaatagaaaggaaaaggaaattgagcatgagaataagcagttgaaggctatataataggtcaatagaatccgtttgcctcaatgctgcctttagagacctctaactacggtgagcatatccgttcttcctaggcctttcaaacagcacatcttcattaccttaaaaccaccttgtctgatggataatagaattatatacaactcatcattctttcattcataaataagttgcgcagtaaggtgaatagcagtcatagaactcttagcgctgtacaaacgagttcttctatagatcatttgattcatactgacatccatagacctgatcaagtgaagaataaggtgtttacctataccgcccccaatgaaacaccatactctctcacttctgatcaaacacacaacacttgccacactcaccatcacacaatcaattgaactttctaccatctcaacgcgattcttgtatgcagagatctcacatgagcttcttcctttctacaaagctcacacactcccaggataccactcaacagataccatccaacatcccacccactcctctacaatgaaatacaaaagacgaggaaagggtaaaccaaatgggcagcagccccaagacacgggccaccactgcaccgtgtgcaaaagccggcaattcaagacagagcaaggcctgagtgaccattttaaatgtcaacacgccatcttcccatgctctgactgcaacgagatctatgcggctgcagtcgaactagccgagcataggtactcagcacacaacaagggaaccttcaacaaacgatacagggtatcacccaacaaccacttgccaacagccaaaggcaacgcaacaagccgacctagggctgcttcctcgcctgccataccaggcttcctctctacaacaaaggtgcctgtgcatctccgtctcctaccttcccgcactcgctcagcttcacgcacgtaatcgcgtacctttcgcacacagttgtggtccagcaatgcatgtccctcaactacctaatcaagtcccccgggagactgagtaggggcatacagcatgcacgcgcgtcttccgaccatacgctagggtcttcggaccacgcgatgaatccggtcaagacccctatctatcaatgcagggccatcaagtccccgtgggtatgggcttctatccaccgcccatcgaaggccttcaccacctggtgcaaatgtaccaggttcccagttaggtaggatggcgattacgattgggatgtcaagcacccccacacatctaccatacaatgcacggggttggggcttgctaagccgggcgtggatcttcaagatgcacgtgccgcgctttgccagtatataatccaggtcgcagtgcaaatcgaccacgctccgtaccataacctgtgagccctggccctggccctggcgctggggctgggactagttcatgggtatggtgctggatacgttcgtggaagccgctgaggcatgtttccctaatttccccgcgcggatgatgttgcctctgcccgcgcgggtaggcgctgaagattcttacgcgtgagctgctggggatgcggctgcggctgcggttgtgaggaaaatcatgtgctaggcggtgcgcacgcatagctgaggctttgatatggtgtttgtgttcgctggagtgtctgatgacataggcggagtaggctgagtggggtgcggcatggtggagggtgttggcgctgaagatattcgcgcgcggactactgagtatggaaatgttgtgctaggcgatggatgcacttccattgctgaggctttgatatggtgtttgttcgccggagtgtctgatgatctggctcgatgtgactttgagtgtatggcagcatggtggtgcttgcactgttgctgtccatgcctggtcctaaggcactccggcgaatttacaacgagggtgtggttctcgggtcgctgtgagcgaaattatttatccccgtactgatcgttgtctctggtcgattcgtccggctggggtggtggatcatcacgcggattggcagtggggatcacagtgatgttttgaattgtttgaatgaagaaagtcaatttcattgtctcctcgtaggtgaaaagcatgaaaagaataaccacctcctgtattactatgtagaaaaacaaatgcgtaattaagtatggtcactattgaaaacagtactaaatcacaacggaaacaaaagaaagaaacattgcaatattggtgatgggggaattaaacgccaactttacagaaacaggtaagaaaaagacagacaaagcacaagtagacaatcagacagtcaagccaataggagtatgactgcttgaaaaaataaagaagcaaaacacttgatatagatatgagaacacctccattctctatgcatgcatcaaagagcctagaaaccaaaatccagcgctaaacacctcaatccagatggatacataacaagggcattaacgtgttcaaagaatactccgactggcctggctacggcctgcctggctgcgactagccaaactagcacggctgggagtcgtgcgactatgctcgtcttcctcgagaacatcactcagacgcgtgggatgacgatggcgtggtgtcacagattcccacccggtgccggggccccatccagcgccgctgtagtccgcggcggaggccggcgccggcggagggacggacgagggggcagaggtatatgcgctttcgggaatatagtgttcgtctagcagagaatgctcatactcttcgctttcctccgaaggagggccaggtgggtagcttaaggagtcaccatgggggtcgtgggggtagggggcatattcttcatcgcccgcttcgctgctgccgacgtaggagcgcgcgtcaggttctgaggttgcggggtaaggaaccgttgtattgtcgtgtgcgtacagtggacgcggataggggacttttgaggtaggtgggtcaacctttttgggttcgatgaaagggtcggatcctacgggagacatcggcgtgccatcttcgtagtattgtccggcgctccctgcaggcttgccgtatgcgtcggtgcccacggttgtggctgtctgtccggggtatggaccctcgcgggtttgtgggcgagtcgtgttgtgccgactaggaaggccagaaaccataggcacaacctggacgcctccaacaagtgttggctctccattgcgcagggagtttgttcggtctcgctcttcttgttcacggcggccaagctcctcccaggcacggcgtgcctcctccttggagatttggagttcgcggcgcatctccttcagcagttcctcagccttgactttgtctttttcagattgctgggcggtagaaaacgcatcggctcggccttgtcgctcttccttgagctggcgttccaggtccgcctgcacttccttcgagcgttcctgctcggcacgggtgtcaaaaaaccagcgctggaacttgcgttcggaggaggcgcgaagacgttgcagctcaaccaccgcgtggaatagattggcaccggcggcagacaagtctgtaatctgtcgagccaattgttggctaatcggatcacgctctagatcctcattgttctgttcaagtttgcgcatccaataactggtgagaccctcccagtgtgaagacagcgtttcccatcgctcgaatgcatgcggaaacccaactcgtttcggctgctgaagagcctggggagcaccttgtcctgcgggtagggcctgggcggatttggagaacccactgggcttgggctgacctccaatttctgccgcactctgcgagcgaccgtgttgaggctgctgagcggttgtttgtggcggccgtgcctggtttgcttgccccgtgccaaccgtcggcggtgcggtctggtattctgatggcctggtactcggtgtattatctggtgctggccggtaaccaggcacagcccctgaagcgacgggtacggtctgggactgtccctcggggccccttgctggtcgtggggctctgattcttgattgggaggcgttttcggcggcaacgccagcagcgtactgttgtgcctgggcctgggcatatttctgggcttctgcctcagcttcagcctgtttttcctccagttgttgccgttccaattcttcctgttctctctctctcgcctcgctttctgctttgcggcgagcctcccgatcccggcgctgtctcatgatatctgtaggtgtcctcatcccactcggtggctgtgatgtccctgagatgggattctggggtacacgggatccgccattctgcccacggctattgttcacaggcccagcgggcccagcgacgcctaccatatctgacatagaagcattcacttcgtcccagtcggtggatagctgcagcggtccacggatagcttcctcgagggcgaaaaggattgcggatgcggtgcgcgacgagaccccggtgtttctctgcggccagtatgaggtatggagaagctggtacggatcgtcgattgtagacccgttgtcgtcggtctccgcttcggaaagggccggacgtaggtctgcgatgccactggctgcagcgcgttgtacagagactggggttgtacgcgccggctggtgtcggtgtggaactggggcgcgtaacgagacagctcgacggtggggcgattggcggacctctgcctgacgggggatacgccgtaagggacgctgagaggcagcgctggagggtctcagttgatgaccggatgaattagaagggcgttgaacagtgggctggcgttgccgcgcaaaggtcgtgaacgttgatgggtcgtaagagtcgtggacttcgtcaggggcttgtggagtgtgtcgagacacctctaagaatggtggataaaattgtggattgggcgacaatgtgagtgtggcgtcactgcttgaagcagaatagcttcaaagatcgcgatcgcaaaattatcgatcgctcacaattcgaggatttacagctccgacggctgtacagaccaatactcgatgcacaaggtaaagcaattgagagaaaagcgaaagcaattcgaaatccgaaaggtgaaaagacgaggaagggtcggacgaggtggctggttaattgagatggctggggctgccgcagctcgagctgcagcgcaccaaacgtgtctcggggatgagcgccaactcttcaagtccgactggccggattcaatgcaaactgatatacggagtaaagacaagaagatattagactggaggaagctgaagggtattccacgttctcccaaggcaggaatgccagcccagtgcctgccctaattgacccaagtctggactttccttccttttttgctttttgcttttttgcttgttcaggctattacgaagtagatccctagggccttcataggctgtatgtcaaatctcaatattgcaccgtcatgcgtccagatcccaatgtcgctacgcaaccaacccgggaagcagtacctcaataattagctgcacctgtactgaaccggtcacacggaccgctgtaggtaaatggaatgtccagaacatgcagtgtctgtgttgtgtatgttgtaggaagtccgaaagataggagaaccctggaaatccttcgggctacaacctgaaatggattcgaggcaattttagtttggctatcgtgccatggttggcattcagggctaacaatgatacaagaatagaactgaatattgtattatgtagtgatgtgttggcagaggtgctgtacgttcagtcgggcaacaatatatatcctggtctggctaagatatatagtcaccatgtcatcatcaattcaggcctaccgggctgtttactatttattacgggcattcatactcctacggagtcctaccgtctgttatatccacaataacgtcgtagttaggctccatccgatccactggctcgttctttgctacttctggaacgaactccattctccacagctggtaaccgtggaaagcgtgaccgtgagaagtaatgatattccaaacatctaggtacatctctacatctctacagcatattgctaattattctacttccaagattctccagtccatatactttacaagttacaacgcactgcccggcatttccccgcaatgacatcttctcgagccctggagtgacgatgacaaagcagcgatcctcgggccaaccctagaaacttggaaccttggaaggttgaaagctaaagatccagtccacagccagaataagccaaatggccggggccccaacacgccaaggtccccccatagtccaagccgggcgtcgcggaagcccccgaagagacccgtcacactacgcgggacgttaaaggggctctaaagtgcggtgcgaggtagcaactatcagaataggagagaggatcagcgtggaagaaatatacggtgactagttaaccacgtctatatatacccaccgaccccatctgggtgctaaactacacacaacagtgcaaatggctagaaactgctccgggggacaatttttgtatggcgatggtctgtgcacgacaaatttagcatacaaagtggaccagtttttcgaatccctaagtgactgtttgggaaccgtgaaaaagatcaacaggtctcgtagtgcggaaaatatatccggtggaatctatcctacgggagtacggaataggttcacatatggtggccttgtagaccatcgattttcaagcaacctgcaactccattggcattattgcacacatttagtgtataaggagtggatataaattctatcggaaaagcccttctcggccgcccgaacctcctccggtgcaaatcacagtggtatctggtttgggacattccatttcttcctacaatattgggggtagttacccgggcgataaaaacatatgcaatagtgaacacaacccctagctatccccaatccaaaacctcaagccaggagaacccaatacaagaccacaccgagaccccaacgagagacacacccgcgccctagaagcactacgaccttagaagtaatattaacccccctgtcccaaggcctgggcctcaggagcgaacgaacagtaagggccacccaaggaaccgggggatttgacacctcagtcgggtcggggaaagccttcccgcagcgtcgcggatgcacgaaacacgaaacccggacggtcgccaggagggagccgaaacccagtattgaggtaggtttcaagcatgccttgcagcctgcagccggggttcgcgggagcttgggtgtttgggctcgggtgtttcagtttctttgtccactgtcttgggatggggctattggccaataatggaagtatgttttgcaagatgctgccgcgggggtgatcattgagatcctctgggaagggatctgttctaggtctgtggattggggagatcgaattgtgcgatcgtgaacgattattttggattgtggttgaggctcttcaaggagtttgttctatcgagggagttgggatggatgttctggattgttgttccattgcccctatgtaggaaccagtgctcgatagatgaatgggctgtgttgcactcgagaacaaatctattcaaaactctatgtgtctgcactcaacatccaacggggaaagaatgtgaccgggaggaccggaggcgagggtttcagcaacgctgagtccgcggtgagctaatcgctcagagatcgcgcacagtgcatgaactgggcgatggagagctattgggcctgcagatcaggggtagtactgggggatgcgctgatacttatacatcggcgggatggctgcacttcggctgtagtacagcgggatgcatgcaagtcagacttttcgatggaatgtggggtttattggcttagctgaggatatgtctctactaggtagtttgttttattttgggctgctttagggcttgcagatttgccacgatgcagaatatagcgatttcggttgtacacaatatgggactgaagacatatgagatggagcgagatctggagttggatacggcgaacacctcggtataattgctggatcgaagtgaatttgtatgccaggtcagaagatgataaaaaagagttcctcgatgaaccaatggcagcacaatgtcagagttacagacgcacaacatttgtgatttgtcaactgtcagggtataactcagcgccttgggtgtccgaccacttctaggaaagttaggatggctcatccgactaaattcaatcgaggcatctaagaattaaggcaaaactagggagatactaggagaaataggaaaccaggaacacaagggagccaagtagtatagctcctttcactcctgcaaagtgcatccttgatattactaagatagaaacagcattaactaaagataactatctagccggccgccagaggaaaaacagaaataaataagcccatgacgtacgtgataggaggacgatttccgatatggaacgttgcgatatcgaattgtgaggctcgaattttaacgttaggaagattaggaatgcccacacagtgttaagccctaacagtgccaaagtactcctaaaccacagctaaagtgctgctcatccaaagtacaaagtgacagagaaacataaaccatatagatcacggcgatcggcgttagtggctgatcccgggaactccgcaccaaattggaggtgatatctcacattttcggtcccagccctctttctgcacagtatttttggagactgcagagagcattatttctttcgactttcgcttctgacaggctgaggacgatttcaaatattaaaaatgagatctggtggtacgaatacctcgtgtcacttccttggcttccataatccgtatcacagatcacagacacgcaggcaacaacgaacacagcacagcgacacagacacgtacaatccacattgtattcttcgggatgtttctcggtgcaggcgtacggatcaagttccgcgcgcccttgctgggggacccaatcgaagggtccttgctgcaaccccatccctacggaaggggaccatgcaaggtcagataggtcatgatcgtctgtgcttctgttgtttacattgtgcattggcatgcatctgcgtttcgagctagccaccgggtcattgttctaaggctctaggtcctcggggttatttttggtataaacatatccccttcaccctggcctccacttcggtcatttcattcctcattccatctctttctctcgtcctgtggcaattctgctctctagacctgtcgtactgtgcctagatcctagagatcttgctcactcgtgttacttctccttcatattactcgagctcacagtcccatggatcacagaggtctttattgtccaggcgagttggacgtgttgtatcaagatcggaacagatcagagactacaatttgtgtcccgtcgccctcacctgcaaagcgaggatcatcttactaccccacagccggcctaaaggtcctggaagagtcgaatcttgatcccttctacctcgaagaatcattggccgctacgccgtcttggaatcattatacatcggacatgcgcaatgatagttttgacgaaagccaatactatcccctttccttgaaccacaacaaggatatccggaacccattacaataccccggaccagatcgctccacacttgcacaggtggagttagagaacagcttgcgattccatcgatacactccatcgacagaggagcacagtccgctgcacagtagccagctgtcattcagctccgtgcaaacagatagcaccactcccgacttgacaccgagcagctccttctcttcttcctacgattcacctaactgccccgacgccgtcttggaggcgacccagcagctatacaagcacgcgaaccaggttcagatcgagcctcgtcgccgccgcttctatctgcctgcatctacaccaccaacatactctcttcccccgccacctcccccgccggtggctcctatcaaccaagatactttccagcactcaaacgattcaactactaccatcaccatggtctacgaagacgtaacaggatcctgctcatcgcggtcccgccgcaggaagcagcctcccgccgttctcgatctgtcgcgtacaaccagttccccaaccagatctcgccggaagcaatccagccctggaactcgccctcctctggatacttctatgatctcccctccatgcttgatcaacccaattaccatggagcctcacatgacccactttgatcaccctctcttcattcctgccaacgacggccctagccccgttcctagtcctgtggctagctccccaccaatctcccgccagtggaccgcaacctcgatggagcggccctcaatctctactatcgacatgttctgtgagcagtccgtatgggaatctgactccgattccgagtctgctggtcgtaaatccatgtcccgtcggccaatagacaccctgcgcaaggttcgcagtcgtgccaagctccgtgccgctaagtcgcagccgagacttaaccagactatgcctgatggcaatgtctttgagcagtttccatgtatgccagaggatatcttgggagagcctatccctgaagctttccgtcctagcatggaccgccccagcactagcaaagaagctgtgcggacacccatcgggctgcagacattgcgcctcgttgacccttcctccacctctctcactcgccctccccgctcccgcaagaacagcagtctcaacagctccgacgttgaccgctccgcagctgccgctttccaagcccagtttcgccgtcgccagcgttccgagtccactgaatacaccaactctgacaagagtgacaaggagaaattgacctcgttttgctacgatcacttctcctcagcccccatcaacggatctcgcgaacagcgccccctcttccaacgtttcatgaactccctgcgttcgttgaactgccagaagccccaaaagtctaagaagaccaatgttaccaccatctgatgcatttacactcggcgttccggttctctgggttcaattttaacggaccaaactatgatacaacataccgacttgaccaacgatccctccaacgatttcataacattgtcttcatgcttccaatgtgtctcgattatcacgaacacgtccattctctcacgctatatctgattctgcttcccgcgcacaatgaaaataatgaatctccagacccgactgtggatggacatagacgcgctcaaccacgttctttacatgcgctatctcgcgccacgaaacgaacatcacgcctggtcctacggaccatgactaccgacttatgactcgataccctcgagctaactatctttaattttcctacctgtcatttgcactctttttctttcctgtcttgactgcgcctcatgcgtgctgtattatcatcgctctgtctaattacgaagttactatttcgaacggtcttcatttttaccatgtctgactgaattatgtctcgccattgctgctacgacaaccaatttttttattcaccttgtgatctataattacaaactagcggaacacgccttttaggtctgtgtttctatgaccaaaaattgcattctctgcactcttgcattcatcaaaagtcgttccactacctcatactctatgaatagacaaaaatagagaccatcacattttacctcaatcatgaatgatcctttgttacttcgttgcctaggggacgaggccgttttctggaatgccagattgcgaatctcagacgatccccaaaggtatctcgaatactacagagtaccgcaacctaacctccttggacaacatccatccgaccgagtaatgacgaccaacaagatctcatctgcctagatagacacgcctcatagcccacgccatgcacggggacccaatcacacccgcaaaccccggaccaccaagggcgaagggagccactaaaccttgccctagaccaggacgaaagctggcagattttgacttgtgcctccgaacgactggctcattgcacggacttggatagcccgacgcgccacgtatgtactgcgttgcgtcatggtcattcctaatctagaacaatccgcagattctctttcggctgtttcagaacactaatatactatatagcgtatccagaattccgggtctggtctgccagcgtggggacactaatgctatcctgcttacctgtcgaattctcgatgcagctattcgtatgtttccccacagcggctgcaccggggaaccgcggcggggatctactggctgcggaggtgggatgctcttggatcgacatgtcgaggcgcgttcggatttgggtacttagggcttggatgtcaactgacgactaccgaccgacactcgcgcctcatgtacatgcacaaggcccaactcacatcgaattcctctcattcaaacacaaaaccttctaactagtgcattcacaaaataagtgtctcctacgcacaaaacccaaagaggataagacacatacatcccttgcatgcgcccctcaacggccgccaagcatccgagacctcgaatctcacctcggctgaaaagactcaacggatacttccacctacggactactttgctccctttactttgtgatagaagcttaaatcaagcctaacaatctgacccgccagacaaagctaagcaacccgtcctccttcccgtctccccctcaaccctcgatctgatatcacaagtgcattctctcctctccaatactgctccgtactccaacacgaccgatcttcaaatccccactttgacaggtagcgctagacagggattattcgagccgggccaaatatagatatctccatcccctgggccggggctcttccgtggccacctcacacgcaaggtcgccgatccaccggctgtgggccctttgcatccccgagacccgccagcttgggcgggtttcagatctatcggactttgggctgtggggctagagggctcgatttggtatcgcgtctagaccttcgtgctgttttgttttgttggaggtgcttttgttttgtgcgattacacgctataagatgtgacatgtgactcgtcatttctgcctcgtgtttgacaggcgcgatttgcaggttgctttttttgctctgacgaattgtggtctattgtagactacatcgataattgcgctggtggctatcgttaaaaattcggcgaaatgtcgctgaattcgcagaataaagtcggatatctaatccgacacgaacaccaccatggcaacagccgtgcatacagtagtgggcagagccccagcgtcagtgtgtcttagagaagcacgatcattatcccaagcaaccgagaacagtaggtcggaccggccttccgcctagcccgtccgccgcatcaaccttgcagtggcagcggagactgttccaaggctctggatactcgcatcaccgccgcaggggtgatcctgcggcgggggacgnnnnnnnnnnnnnnnnnnnnnnnnnnnnnnnnnnnnnnnnnnnnnnnnnnnnnnnnnnnnnnnnnnnnnnnnnnnnnnnnnnnnnnnnnnnnnnnnnnnnnnnnnnnnnnnnnnnnnnnnnnnnnnnnnnnnnnnnnnnnnnnnnnnnnnnnnnnnnnnnnnnnnnnnnnnnnnnnnnnnnnnnnnnnnnnnnnnnnnnnnnnnnnnnnnnnnnnnnnnnnnnnnnnaggggggtggccgggggggggggaacgagcagcggagaccccgagagacagtggaccgcactctgcaggaactcaatcctgcatttgcacctgcaagacgagaggagaccttttccctcctgcgtccctgtacctggaggggcattgttatgtagatcgccagtcaagcacagccagccctgtgtcgtatccatgacaaagacatagtgcaagccgtgagaatatctgcacaaatccaagacaacttcaactgtgctccacagcctggccctcgcccttgcccttggccttggcctcctcttcttcctccttcttctccttctccttcgtctccaaagcctccatattctcctcccacctcggaacctcaaccctcccctcccacctagcaacaacaacatcccccttccgcccaagttgggtctccgcccgttcctcctccccaccctccgctctcggcgcaatctccggagcgccatccgccccagcaaaaacagcctgcacatccagctccttcagcgcagcttcatacagcacccggatctgctcccttttctgtcgcctcaattccccaatttcagtattgccatccttatccgtccccgtagatgaagcggcagaatgtcccgtccgcacagccggcttcctcacaacacccggtccactccgctcttcgaacccgcgtagtagtccttccataattccgagtaccgtaccggcacgcatacccagttgcgcaccgacggggaagcctccgtcgaagccttcttgcacgtgcgcgcccttggaggcggacgtgccgtcgcggtagcctgctgtgacgtgttggcggcggaggctggggaggtcggagggttcggtggattgggggagtgggcttgtggctgatgggtgtggtgcgttgagggtgctttcgtatggtggggaggagccgaagatgtcgtcgagggagttgtcgtccactgcggggttgtcttgggttgacattgttgttgctggggagggtggggtggagtgggcagatgatgagtctgtgtgggctgtcattgcccaggtagtatgggttttgacttcggttatggcttgcgactgtagaggtgtcgtgggttgatctgagtttgtgaggtctgagttgaaaaaaaaaagatagcgggtcggcggggcgatccgttgatccacggaagtatgtgtatggagtttattttggagtgtttatgacctcattcaacaagtttacatcatatatatctaggttatatagatatggatacttatgtgaacaataggactaatatggtggaatgtacaggtgagttattcacttcgaccgggaatgccttccgcctgatctaagtgaagagatttctttgctgaatagtctatccctattgatcagatgagagttagcaattgctgcgtggaaatgaggctcttcagaatagggcaaaataggtggtcacgtacagttctgaaccttttgagcgataacctttcttgcaggcttccaaaataactccaaatctgcacctgggcgaggtttagagaaaccaacctcgacgacttgaaacaacacatccttgctagaaccttcgattttatcaacatctttgttggcctgggtattattaaatgcaatgaattccctggttccgacccgaacagcattcagccattcgagttgttgctcattgccataaaaggcttttgacataatttcccaatgaaaaaccagaaaggccaaggcttgttgaagtcgtaaggggttccagagatggactgcatgattgagtccagtctcttgtcagaaagccttatacaagatgagattcttaggaagagagaatacctggagggagatgttgcttactgaacaacaacatgagtgatatctggtagcagtttggaatttgtcctcgacaattatcttggctgaaggaactgggactgttatggcattatgatccggcagtgtttcatccattgtttccgtactctgtaatgactgtcaaatcgttgtctgttactccgtgcttactcttgagtgttacgaggatacctacacgtgaccaatattatgccttgttctcaatttcggttggcataaggaataaatcagtgtatctactgtcactaggtcaaaattctctcgaacgcaacccggcattcttcagatgggtttcttttctacctcgaaccgtgccgattccttcattgcagccggtacaacctcaacaatatatgccgttgacgaaaactttgtcatcaaactccgtccctcatcaggggattttcagcgccaagcttacgacactgaagttcgctcttacaagcgacttgggcaccatggacacatcgcatcttgcgaagtaaacgaggaaggtctcctactggaacgcgggatttgtcttcggaccatacttcagagtgctggaagcacttccgatggaccgtcgaaagccagggagtctccgatctctttagctacgaaacttcaatgggcgcaggaagccgcggatggtcttgcatatattcatagcaagggtattgtccatgcagatattggttgtcacaatatgactgtggacaactccaaccacgtcaagttcattgacttcgctggttccggcatcgacagtgaagccccgttagtctgctacgagtggttcagcttccaacctggtaaggaaatcggtgtatgcacggatatatttgctttcgggtcaatgctgttcgaacttgaaacagggcgtgtcccttatagcgagctggaagggactatggagatggggaacctaattacagttgttgagaacttgttcgcacagcggcagtttccatctgtggagactttggccctcgggtctgtcatttctgcttgctggaatggcaaatacaattcaatggaggaagtccatcgagatattgcgtgtcaaagtaagaattattcagagaaaagcctgtaaggttcggctgttgtgagttggtctaagcgggtcggggcgatcaatgaccaatgctatgttgggccatcttttgagactttggcccccaagcgcatcagatgatgtgcccaaagcagttagcaaccacaagcctcatgttctccatttcgatttacatgaagtctcctaagtgacaaattcacagccatgtccagacgcaccctccgtctcctaggctacaccaccgccgtcactggcataaccggctacagcatccaccgaggactaagccacctggaagaaaaatacccagcacttccccccgcagcaggcagcagagccctccgcacaccggagcacccaaatacacaacgctgcgcatataccgacatctacgccgcccaaataccgctacaagccctcgaagcacgcatcccaagcgccaagaaatcatcaaaaacagagctcgagtatgcctgggctcgatccgtgctcgggagcaagctcctacgagccgagggctctatcctcggactactcacgagcttccgcttcacgccatgcgatacaggcagctcgacaggaggattctcgccggatgaaaccaccggtgcgccgcgcgttctgctgaacggtttatttcaagtacagcgccttccggccgctgacgcggatagcaatggactgctagtctcgtcggaattgcccgacaagccccgcgtgttctttgagatgattgcgcggtgggggtatccttggcgcttgatgtcgtgtgtgaaacatgagatgagtgtttctgagccgttctggaagaatggtcaggggatgtttgttgaggtgcggtttgcaagtgcgcatgattatgagattgtggatgtggaaggtgagcttgggaaacagaagattattccggattggactttgaggttgcatcgtggatatgctaggttaattcttgattctgctgttcgagagctgcaacgggatgttgagaaatagtctcgctttcgtattgggctctcttttatacccttcgccttccaccttggagagctgaattagctgtgggtatacctcaggcctgctaacgtcggacactttggtttatgccgtaatttggtatcagaagatctattgtacactcccagggagcaatgcgacagccataccttggacttgcgatgacattcatctcgtacttagctcttcaacaagcactatatccaaacttatacacatttatctgatacaccctattcctcgccttcatcgtcacccgcatccgaaacacaagcactcccatttggaacaacggtccacgactcgaacccattgtacaaataacacacatcccagccgctggtaatgctccctagcagactatccgccccaccggagcaatcagacgagctgaacatgcaaagatcataccggttcacgtcggaggggctcttccacgagagacttttgacattcgttgagttgtagtaggtagtatctaacccctgacagtcgagcgccctcgcgccggagtagtggagaatagagtattggatattgttcacggagctgttgcaggccgggggtgctacgctgagaaaacggaaatcccactgtgaaccattagcaggtttgatttagcataattgtcggaatccggcgcgtttgacatacggctctgtaggcaagaactgtgagatcttctgggttgggtagtgcgttgacggtccagggagcgacgctaatgagcgtcaagcatgtaaggaatttcattatcttggcagaaataagactaaaaagcagggcttgggattatgcagatataaagtacaagctggagggaaatgtttatttgagatattcaggacataattgcttcttattatacggagtaccaccactcgccatcccattcagactattttaatctcaaacacctctgcacctgcagaagcggagcctgtacctccaatcacagccatcgacggccaggagagactcgatcggctcgatggccactcctttcagctgcagccagagagcagctgaaagaacatggccaaggagaagccaggacggagtaactacggggtactccacagaggggtctcgggtgagttttctcttggcgggggaaaggcacgatgctgttgggctctcattgggcgcgatattggcgagaccctggttcctgtgttcctggagggtccgatcggatatcctgcggctcacctgatctcggtggaataggatgaggtatattgaggttgttggatactcagtacatattggttgtctcgccgatttagaaggatgagcgttaacttggctcagggacgactggacgggattgtgtgcccagacatttatcgagacaccgagctgaggaacggcgaggaaaggaagtacaaaaaccgcgaaaaccttgaaattggacaaaagaagcttttttttttttaatatactatctttccggagtaacctacggagcatacaataatgcatcatgcattgtgcttcgtgacaaaaaccatacgttggtccttcaggacactgtaataacacccaagctggtgagaaagacgcctcgtctaaattatttatctattcaatctatagaatatcccagacagatggtgtacaaagacattataggccgtcacaacacaccaaaaccacggagaactgtctcacccgcgctggggattagacgtcaaccgccaagcccggagaggcaagtcctgtagcttctgcgcagccggcttgataaacataatgaacgtgagcgtgccaatgagcacacagagtatgttggtcatatagtacccatcacggtcgatgtggcaggtaccgccgccgttcacgcagcggttcttttctggctcaagggcgcaggagaatgccgtcgtgataagagtgtctttgagagaatcggcgggtggggcgatggttgggggaagacatgttgcttgggtgaacatgtcgacgagtttgaggacgaagattcgggggaatgttccacccaggttgcagacgctgagatgagatgttagtaatgtgtgcatgttggggggaaagggagtaggacttacgttgcgaggagggtcatgtacgtcccgccaatggctgggtcggcgattcgcgcgtggaaggccgagatggccacgaacatgaccgtgttcataaaggttgagagaacatgctcgccaattaccgtgagcatgtaccacattggcatctccgaggctgtgggatagatcatgaccgtgaattgagcgagcacggcggctgctagtcgtccgataaaagcccagccccagaggcgcattgctccgtagttggttgaccactggccggcatagtagcccagcatgatttcaaatgggaagtcgatcaacacgaccagggccatgttgtcttggccaaagcccttgtcgaggagcttgagactagtgactccgtcattggcctggaagccgatcttggcaatgaggtgaatcaggataatggtctggatgttcttcaacttcagaacgctccacatgcttttatacacatccataatgctgtcgcgttctttgctgcgttcttccttcttgaggaaggccagaccacacgtcacgatcagatacgcccagccccagaagttgagataagtgccgagagatagcagaccttcctcgccggggatagtgcggaaccatctgttcgcaaagtccttggagttgaacgccaagaagacagtgtaggacaggaaatggcccgccgtcaacccgaccgtttgggcggtcgaggcgtaggaaatgttcggtggggacatcaaagtgatcgcccatccatctacagcgatatcctgggtggcacagaaaagcactagcataaaccaccagtatgtgaatttccagacgcccgcgccattatccgcgccggcctcgatcatcatattctctatatggctacccatatagatcatagctagtccggcgatcacctgcacgggggtgatccagctcttgcgccgcccaaagcgcgtactccacacggcatcgacaataggactccagaataacttgagcgagtatgggtatgaggcgagcgagaagattccgatctggccgtatgagaggtacggcttgagcaggaagggtacggagccggtggccaggcccatggggattccttggaggaagtatagcaggaccagcagcagaaaattgcggcgatcactgcgcggtagattgtggaacgttgtgtttgtctggattggggtttgcggcaccaggtcgttgtcgagggagaagctcggtcgcgacataagttgggctgttctatcggctgaggtctctgcggagggcgtatccctcctgcgcatttcgatattgttattcatcttgccattcgcacgtccgtttgacccggtagagactgtcaggttcgctttggaacgccgcttcgagagggtcgcgtgcttgcgtgtcattgaatgctgtgttatggtagggagcgatcgcctttgtcagcttcggcaacttcgtcctgattggatcgaggactgaagttgggtattatgtattgaatggtgaaagggatggatcgagggttcggcttcgaaggggctgcgggtttagatgctcagggtgtgctgtatgttaaattccactgagaatgaaggagtgaatgaggaatataaaagaaagaaacttcagcgaatctttagtgggggatcgttgaaccgtaggatgacaaaaaacatgaggcaagctggcctcttggctggctgcagatccggggacccgaggggttctattttaatctgcctggatggaaaatggtcgatgggaatggacacaatctgagtctgagtctgatattgatgtttttgatatgtatattctctcttgtaacacaaatagcacgttccctatgaggtcaccacatcaacacggtaggactgcaggggtcagatctataaacccaaactccaatttaaacacctttgaggcttagtctcaggatttcttcagatcttgcataagaaaagaacaaactgatgatctcagcccactccgcccactccgtaagcccaagcttctgcagaatcgcgtcagatgttgatgagatcacgtgtcaaaataaactatgacaacataaggatcagaatcaccgcgcgaacctcaccagctccccaaccaatatccaaaatgacatctcgcgttcccacatcaccagagccagaagaagtggagctagacacagaaatcgcctcaatccgcgcagaaagtaagcatcccaatcccaatcccaatcccaatccaagctaaatcaacaaagtccaaaccctccgaaaacgcaagcgcatcctcacatccagcctcataacaaccgacacagttcaaaacctcctcaagaaacctcaacccccaaccaccaaaacaaccccaacagaccccctcaccacaatctccccgctcgtccacgccgccggcgcccacacctcctcaaaccaccaccgcatcgccttcggcgcaaccgccttcccattcaaagacccatccgcaacagccaccgcgaaacccctcctcggcgtgcgtatcgacgtatgcacgcgcaatggccgcttcgcgaaaccatactacatcctcctcaaacaggagcggggtcgcgcagggcctgagtcgggtcctaagatgttgaaagtgcatcggcatacagtgccggggtttatatcgatgtcgaagctagagggtgtgtatctaccgcggcctggtgtgatgcgcgacaatggagatgcggatggaggttcatctggcggggatgaggatgaggacgctgaacctgtgaagctggggaagaagagcggccggaggcaggatcttcgcgggtttgtgcgcgagcttcggagggagcttgttgcgtggcatatgcgtgttgatgctgttgagttcctgcgcgagaaattgggccttgttggtgaagacggcgggtccttgccgtttgatgtttcgccggatcgcgatacgggcattgtgtctttggctgctgttgcagttgaggcgcggtatgtgcgtgttgagtgggttgatgggcgggttgggcggttcaagttgtctaatgctggagtcgtggagcgggcggttgttattggtgatgagggtcgggataagaaggttgaggatgcgatgactggtggtggtgggcgggttgagacggttttggataggttgagggttgatgtgttgtctggagcaccggcgctatgagatgttgttttactttgtttttcagcaagagataccccaatgtcaattttgaatgttcgaagcaaattaacttgaattccagagcagctaaattataaacaggttggtatatctattcaatggtctccaccaaatgctacgcaatcatgagacccagaagccgtcgtgatgcgtgaatgtgtactccgtacgtgactgtcaattcaaaagcagaaagtttattacaagggcaaggggcaacatggacagaaggatggggtattataagggtatatagagtagatgtcgtgtcgtcgtctccaattagagaggcacacaatccttgggatggattgtatcgggggttgaatcgggggttgaagtttctagtggtgagcgttccttaacagaaatgggggtattgggggtggtgaaagcgacaagcggcaaaggaccatatgactggccatgtcgcacctcgagatgccgacgtagcacagcctcttccaaataccaacggtgccgtagagtcgtcttcttcgtttccagagcttgcatgagagagtttacttctcgttggtgctcgagctgcaaggccgcagcatctttgatgtgtcgtttacacatttcatccagttctttttccatacgcgcggtggcttcctggagcttgagctcttggcggtcacggaggactttgatgcgggcgtgatggagctggtccatggtcttgtgggagtggtattgttgttctagctgctccatgtgtcggcgcgtgagcacacgagctggcgcggtagagtcggattccgagagagattccgatgaccgttcggatcgttcggatcgttcggctctgatcagtgttccggcgggagatggcggcgggctggcattgcggagatatccttccatatgcttgatgcgggtgcgcgagttcattttggcgcgatcgaactcgcgttgctgttcgatttccaccgccagctgtcgctcttcgatttgggctatagcttggatattctgcacaaacgcttgttagtaaaaataaattaagatcccaatgtcgtaaagcgaaccttttcgcgtttctcatcctcctggcgctgattgtcagactgttgctccgagacagcggtctggtgccgacgccggagggtacttagagcggcgtgttggaaagcgagatgtcggttcctttccatctgatgccgctcatgcatctcgcttaagtccggatcctccagacttctttgtagttcttctttgctgaaccgaggtatttccaaccggggaagtgttacctcattgctcgcgtggggtataacattttcatgggcagcaatgacaggttccggcttgggttcgaagaaaacatgttcaaggtctttgtcgctcgtggatacagttatgcgatcttccgaaggcaagaaaatggccgaggacgtgcgtttcttgcggaaattaatcctcccgatagcagacttgaagctgctccgtcgcctccccttcttgtcgtccgacgcgacgctgagaattgaatgccgatgcaagttggcaaacggatcattataccccggcgctaaaaggcctgttctcccctcactggagcaaaacgaagtcgggcgcgtagacagcgaagccagcgatcgcgtactgccagtcttgatgcgatccgaggaaagcgcgacatccgacagcgaggagacaatatcatcgagcacggatggcacgggggaggacggctcgtgggacggggtgacggagccgcacacagaattccgatcggtcgacgatccagaagacaggactggcgaggaaagatcgaccattcctgaggcgatcgaggcggccagtggcgcagaagctgcgatctctggcactttcagacccagttgttgagcctcctcggctaggtgctgcgcctgcgctgcctcggattccggggaggggtggtggaggacatcggtgcgatattgggcctcatcgaagatgggcccggtgtgtgactccattgtatgtacaattataggaggtatgtggcgcctaaccagcgggcgcacatgaaattccaggtccgggagagagctaagaataataccggttccacatggatgcgttctatgacggcatccagggaatctaaggatgaggggttgtaaggacagtattaagagttgaagggtggaggtcagaggtccaagctaaaaggttcggggccgaaaagggtagaaaggggaaaacaaagcgcagacgacggttatggccgtttccttgtttcctcatgtttggtcgttttaggcaattttgggaaaaaaaggaaaataatcacctccgacccacgggtggtcctgacgccatccatggttctacgccggggatcgcagtgaaacgggcaattgcatgagagatcgatctagctctaacggttatatcggctttatgctttatttacacatccctgcacctgcattcccaaggtatacgcttccatacgctggatcccgggcatccctacggatagataacgcccctcgatccaggccatatgaagaaggtagggcttagggctacttaaattgcctcggtcccatggaaaggacggatcagcccatagatcaggccatttagagacctcctatctaggtagttcaatacaacatatgtatgtagccaaggaataaccctactcgttcaacatgtcgcatgccagttgataggcccgctctttagcttggtattgcggagtccccgccctcgtctttttatccttatcccatccatgactacaaccccgcatgcgctcactgaccacatgccggcctggcaacgtcttgatcctctcagccaattcctcgccctcgggtgcgagagtatcaccatcggcggtgatcattagaacacgtcgtgggaatcgatccgccggagcataagtcggtgaaatgcgtgggtcccgcttgtcgaaggatgggggtacgtagcagcggtcgaagaggcgcatgagagcaagaggaatgacgaaatctgcacgggccggggcgatctttgctccaggatcagagcctatgtcggtcacaggatagaatgctagcagggagcggaaggtctcgggagggaagaggtttgacgcagtcgccagcgcgaggttggccccagcactaaatccagacatggatactcgggtgaggtcgaattcatccggacgcgtgagcacgtatttgacagcgtcttccacgtcgttcagtgcggcggggaacgggtgttcgggggccagacgataggagacgtctaagacagtgtacttcgtttcctggctgattcgtcgacaaaatccatcgtcgccgccatggagcggtaccaagaagccaccctcgtggaagttgaggaggacgggtgacgggcctgagtcagaggactgatacagatggatcttgatggttcggccagcatcccgggatttgatatggcggacttcatctggactggccgataccttcatggtaaggcgcaccattgtgcgaacgagaaacacaaagcatttgttatagtagtacatgagaatatccatggttggcgtgagatgctgtatggcgtgagacgatgtagtagttatgttgaagctgagtctcaccggaggccgggatttgaaaggccactgctgacctcccccctcttctagtctattctagtttctgacatcttacagcccgtagatatccaattagaaatgattaacatgtactttttcttatttctacctaatatattccacccaattataaggcatattcaggccagaatctcaaggcacccctgcattacacagtgtaactttatccggataatctgataccttcatcccattgtttgcaaataatctacttgtataatctccgtgatgtgaaccatagctgttctagtgcgttggtatatctcaccgctcgtggcggtattgagccccttatcaattagctctcaattccccgcattaggacaattccacgcagagcctcattgccttccacgcacccgtccaccaatcagaatgaccggtttctgtcgtcacgctcatctccaacacccatcgccatcgcatctatcgttccccttttagagacccaagttgtctgagaaacaaccatcctagtttccaagcccacgacttttgagtttcattaaccaaacaaagactacttaatgagcttggacaggagtcctgagagacctcgctttcaacatcatatcatctacacgcgattttaggatgcccgtcaacactaatttcacagtcttcatacgcttaccatttccaagaggcgactttgtcgatccgccacctgcaagtctccccaaaaagacccctggagcatccactgacataaacaggtggaatggaatgcatccaaagatcaagcattatgggatatcctttctcggccatctaaaggtgacatagactgtatgtattggtgttgctttgagaccttgctttgatatcgctgacatcatcacagggaaagctctgtaactggactctgcccctgacactttagcttggagctgctaacacgcttgtttagggcagagaacttcgatgtcaccttgcagttcctccttcagcaggcagcatggctctatgatcgccagctatcgcaggttcgggctcaaatgcgcaaggtcggcactacacagtcgaactccccttccccggctccaggatctgtgtctggtagtacagcattgggtggacagtcacagagagaaacaccagcaccaggtatatcctagcttgctttatgttctttcttgtctatggtctgagactgatgaccagcaggttctcgggcgccatcccggcaagtatctcatccgaaagatatccctctacgaggtatggaccgaaaccctacccgtcttcgcacaggccatttggtaccgccggtggatcgatcacgtttaacattgactgcagcccctgagaaccgacgtaccagctttacatcaactacgcctactaacctcacccgcggacctcgggaccctacacgcaccgccacgccgacaatcgatgacaaagaatcacgctgggattctttggctcaccggccttcggctgtgagacgagaacaaccaccggtcgcgtctttgcccagatcttcgccactcgaggaagagtctctgtcctcgagctcatcggaagaatcagcatccgacgacgataacacaaacagacgtgcacccctgttcaaacggtttggcaaattttctactcatcgtctacgggatgatgaggacgacgaagaagatactccagccttcctgcccctatcccgcgaacatgggcgtatccatcgggaccggtcaggccaggaactcagcgccacactccgtttagatgccgagcgagcagcggcgcaacggcgacaccccgagcagcggcctaatcctagggtaccggcaccaacggactcatctacaagctcaatcagctccggtggacgtagcagcctacccggtggacccaggcggaccagccaggggggatcgatgctgagccctgccgaacgccagaattcgcgcaagtccaccgcctccggtcgcgaagctagcgatggtactcccagcatgggaagcagcttcagtgacctcgacggtatgtgtcccaacccccaggattctggatttcaactgatcgactggtcagatgcaagtgttacccagtcagccctggaggaggcccttctaagcaacatgcagcatggtggaatggcgagtcggatgagcactatcagccaagccttgcgcagccggtatttgcagtgaaatgcatcttacataggaatatctattttgacaggttgcactacaacgtagtatgtgtacaacatatgatgtagctcatgtggggtgcctgactgtgttcccgcatatggcctccacgtgaccgagtggcgcctcggcatctcggtggtacgttccagtgacatagtggcattatggatatcttcactttgtccggagttccctatactcagatattccaggtattcactgtcacgcatcggtcagacgggagcgctagtgccggatcaggtcgttcagtctcaacgcccagaggagacatatgatggaggggtagctcaacctagctacctagttacgtttaaaacgttgaatgttcaacataaagaactgttggatattgtgaataacgagattcttggccgatcctgaaaagctgaccggcatcaaagaacaccgactacaaccccaccaaggttaggacgccgagcggcatcctcggcatctcgtcgactacactcaccggcagttcttcgattcacaattgtccaaccccttttctccgttgcaaagcgtctataccatcattcaaaacaatggcacccccattagtgggcgacatgcccccagcggaggcagagtcggtctatttcaatgaataccccccaccaaaggcactgccacgccatgaagcgctcgcgcgcgcattcattgacctgcacgtggaggcacaccggcgtgtagtactcgtcacatccggaggaacaacggtaccacttgaagcgcaaaccgtacgattcatcgacaacttctccgccggcactcgtggcgccacatcggccgagtacttcctcgagcaggggtacgcagtgatcttcctacaccgacaatacagtctgctaccgtactcgcggcactacagccactcgaccaattgcttcctagacttcatggatgagaagccggcgtcggcggactcctccaaccctggccatggacccatcatggtgcgcgacgagtaccaagacgagatgcgcagcgtgctgcggaaataccggtatgcgaagcagaacaacctcttgctgctgctgccgttcacgacagtctcggaatacatgttcgagctgcgggcaattgcgaagctgatgcggccgcttggctcgaatgcgctcttttacctcgcggctgccgtcagcgatttcttcattcctcgcagtcgcatggcagagcacaagatccagtctggggagttgcctccgcacatgcagggcagtgcaatctcatcggatgaaatctatacgggtgagaatgaagaaaatccttcgcatagccggaagctcgtcgtcaacctcgaccccgtgcccaagttcctgcaccagttggtagatggctgggctcccgaggggagtatggttgtttcgtttaagttggagacggatccgtcgctgcttgtgtacaaggcgcgcgctgcgctgcagcgctactcccaccacttggtgattggcaatttgctttccacacgcaagtgggaggtggttttcattacccccgatgagccgtatgagcgctggcttcgggttccgaagtccaaacgcagcaagagtatctctggggttgaggatcaggttgggttggcggaagctaataaggcggattcgtcgacggtggagcagacggaggctaaacagattgatgagaacagtcgggatggaattgagattgagagtctcattatcccggagttggttaagctgcatactaaaatgatcgagaagaacaagcaacctgcgcagtgatatttcttggatgtacaattcaatgtgaataaataatgagtcttctcgggtcttttagttgaattaattaatactgacatgggttcgatgtagtactatgtatgtctatgactttatatatcattcttacagctagatcgttgcatgcactcatttttgagatattcaacccgctatcagtgttactcacacactatgaactattttcctttttgtgatgtcttctatactgcttttgaaggattgtatcaccatcattgaaagactgtatacgactaaatcgtgtacacttaggtactttctgtatatgtatatgtgactactctcaactcttgaatgcttcagattcgactactcaacacgtcatgatatctccgtgctgatcctggtggaccctgacatcgtgcgggaccccggagctcttcacccctgaagtgaagccttggaatatctctcatttatagcaagggatcaccatatctcaaacaacatatattggattcaaggggcagctatttaaaacctccaaattccatctgggctacgcgtcccgatgtgtcagcggcaaacttcggcggcgatcttccttagctccgacctttccccagtaatttgctcttttggttaacaggagaggggggaaaagatctattttcaagcactgttctggagaaaagatgatcaattgatctattctctgtttggtgtactcaattttctcaggatggtgtcccgccggttcagccgtcgcctgattgtagttgcaaccgtcgttgcgctcatcttcctctacaatatcggcttcctctccagtcacaatcgccaatggcgccctcacttcacacctacgccggaaatcaccccggccctcgatgagaatggtgaaccaaccacatactgcccacccctacccggcgtcgaagatgtgctcgtggtaatgaagaccggagtgaccgaatcgcgcgagaaagtccccatccacttccgaacaaccctacgatgcatcccccactttgtaatctactccgacttcgccgaagaaatcgagggcgtccagatccacgatgtcctcggcaacatggacagcgccgcaaagaaaaacccggactttgacttctaccaccgcatcgtgaaatacggccgcaagggtctggagcaacacgatttctccgacgaagccaactccgccatcggaaaacccaacaatccaggctggaagcttgacaaatggaaattcctcccgatggcccaggaagcgctccgctacaagccggacgcgaaatggttcatcttcgtcgaagcggacacgtacatctcatggccaacagtcctaacctggctggcccggttcgaccacaccaagccacactatctcggcacggagactcagatcgcggacgtcatcttcgcccacggtggctcgggcttcatgctctccaatcccgccctacagcgcgcctccgacgagtacaccgcccgcgaggtcgagctgaacgaatatacagaccagcactgggccggcgactgcgtgctgggtaaggtcctcagcgacgcaggcgtcaatctacactttacatggccgatccttcaaaactccaacctcggcgaactggacgagttcaccacggacttctaccgaagaccatggtgtttcatcgccgcaaccctgcaccacctctccccaaccgagatcgagagcctctggaaattcgaacaaaagcgctggcgtgatgtgagtgaacccaatccattctaccactccataacattgaaaaaaattcctaaccaataacccattatagaaaaataaacgcatcctcctgcacagcgacctcttccgcgaatacatagccccgcaaatagaagcacaacccgcacgtacgaactggaacaacatggcagacgaagaacagcccttcgcacacacacccgacgactgtcgcttgatctgcgagacgcagaccacttgcgtgcaatttgccttccgcgaagataaatgcttcacgagtctcaacccgcgtctcggacatgccgttccgggcggtgttgcgacgtccggctggaatactagtcggatccgcgatatgacggcgaagaagggagtttgtcggaagcctgatttcggggattgaggtgtaccgtgctgagatatttttgggggtttttttggtttccgggggtgcgtgttattatatgttggttttttgccatgtacgtggttttcttatttgggtttatattgctttgcatcgagagcgagaaatgggcacgatttggcgattgcttgggcttggagcccggtctgatatttggcatacggggtgatttgggtcggttggaacctgcatttttttttctcctctgtgcatgtactaccatcttctgggacctgtggctgatgatgagcttgaatagacaagctgtgttagtggcgttggtgcttggttgaacccttcttatatacttgatcgctcaatacacatcttgatcaaattacacagaaacccatcttttcctgtggaatcacaactttgcttcgtcattgatctactgttcaacgaggtaactggaaaatagcaagaaacgaataagaatagcattgcttgggcgatgtcaaccaccaattaggagagagtacactaagaatatttacaggacaagtcctgctgtgcgtctgtacagatttcacggcgttatccattcacaacgggtggagcggacgcatcctccatacactggtcgattcgcatgatgtggtatccggctcttttgacatgccgaatgaactccggtagatacccaatggtagtcggattcaggtagtgcatgacggcaagattcccgcccttgccaacactgcggacgaaggcttcaagctgcttctctggggtagttgtgtttgcccatagccagtcttcgacgtccacactccagttcacaatgtacgggtttggtatgtgtcgggctagctcctggcgcatccgggcagctactgtaccgaatggtgggcggaagtatgaagctacaaatattcactgtcagatgattctcggggatgcatcaggggcaaacatacacttgatgtccagccggtccctaaagatttgcatggactggatgatctcgtcatcaatctggctgagagttggcaatgcttccatccttgaatcaccatgtcagccctcttcacatgaaaccgaatatttggaatagacttactttgggtgggtgttcgaatggagcgccacttggtgacccttcctcaacatttccctataaaactccgtgaaattggtcgtccgatccctgagcccagcaccaacaacgaagaaagtgacccgcacatcttcgtcgtcaaggatacgcatgacctgctgagagtactgcggctgtccatcatcgataccaaatgcaaatgaattcggacgcgaacaacggagaaccaatctcccactaggcagcttcccaggcacccgataatgactattctcctgcgatggcgctggaacattaggcacgatctccacatgatgcagagtcagaggttccttagtatagaagccatggaacgaaatcgacaccacgcgattgaaatcgatattgaaatgagacagaggtatatagagctcacgagggcctgctggaatgtgggcattgccatgggggcgcttgcgtcgaccgcccttgtgttttctatgcttgtgcttcttcctcccagcatcggccttaacatcgtcatcgtcatccgagtcatcgtcaccatcttcgtcccaatcatcatccgagtcataggcttcagaggcagggtgaaccacataccgctctgcctggacggagtctgcaattccggggaagggactgcgttgagaactacattcgtcgttgtgttggttaaaagagacactgtacttatccgtgccttcgaatatgacatgcaagtactcgttgtgccagggaaccaggctgtagcaggcgttggaatcgaactgggtatggaagttctcgtccgggtctgttgggaacagacgaatgaagcccggtccatattccacgggtaaatcctcgccggaaccgtgccagaatcccaggtcgttgcgagttgggtttttgaaagtgtcgatgacaaaaggggcgcttgacttctttatctgcgaggcattggacgaatctctgtgggtaagccctcggagttcattccagtggccatggtcaacatttccgtgaaatacagctgaggttgggaaggatagcgaaagagcggcacaacctataaataaccaatgcatgataaaaaactgccttgaaaaaaagattgaatgtgctttgaagaggtcaaggtggaagttgtaaaatgcatcgtttatgtactcggcgcagtctgcctgggcaaaaagtcaagaacgattgactacaaatctaaaggcaggagctgtatgtcccaagtctgtacatctctacatgcctactctctacaatttaccagggaattgaaaaatgaaactagatagttgcataaaacccatgaaatccgtaaagcggcacatctgtctgaccttgccatccatatcactgcattggcactcacgctaaaaccgatcctgatccaagatcaaggaggaaaggtcttatgttccacagatccaggttgcatatcgtcaagagatcaagccctcaaaacttcttcggggtgtgagatctgatcctggtcatccagggtaaaatttcgaacttggtaaaaatcatcctctccaccttggacttctttcgtttccatttttttgttgaattttctgttttttccttgtcattgtcgtttgtgtttgttgagaaaggtcctctaggcccagaattcgtcatcttccttgggagcaggggccttgggggcccagtgagaaccggccagaccagccttgtccttgcgcttggctttctcatcctgctgcttcttgtgttcgcgaacgggaaggttcaaggcagaagcctcctcttcctcggacttaacagtgggcttggcaatagcgggttcggtaaaagcgggatcgtcgttgtaaacaaaatcctcatcattgacaggctcgttattggcctcttcagcatcgcttgcagccccgttagcactctcctcaacctcgtcaggttcagcgaaagaagtttcttcctcagcttcagcatcagcgtcagcattggattcagcatcagcgttggattcagcgtcagtgttcgattcagcttcaccatcagcgtcagaaccagcgttagatccgtcttcaaagaattccttatcagagtcatcgtcaaactccagaacatcgtcctgagggcggtatgattcgaggaattccgggacgacttgattgcattcgaccaggatcttcacaagatcctcagcaatatcctcatcgcgttcattgtagaaagaggtggcgatgccttcgtttccaatgcgagcagtacgacctgtgggtggcaaagaaaagattagtggcaagttcatcaggagtatcggggaaaagcaatatctggagtaacacataccaatacggtgaatgtattcagtgatacctccgtgcgccgcgctggggagatcgtagttcacgacgtggagcacgttgatcacatcgagtccacgagcagagacgccagtagcgatcatgacgggacacttcgcagatcggaaggcacgcctaatttggtgggtcagcaaagcaaaataagagagggcagggaacaaatactcacatcgcatcctcacgctcacgctgagtccgtccaccatgaatcgaggtggtgggcattccagagttgtaaaggtaatcatcgacaaagtcaacctgatccttgctgttgacaaaaatcaaggtgcgaacaggaggcatgctgatcagaaggtcatagacggcgcgcatcttcttgtccttgtcaacccagacgatcttcaagtttcactaagcgttagctcgaattccacaaggtttctcccaatcttagtggttcacatacatcctgcacaacattgtggtgcgaactgccggctcggccaacgcgaaggcgcacatggtcctggctaaggtattgctttgcaagtttccggaagtccttgttgaaggtagcggagaacatcaagtagcggtgatcatcatcctcgttgatatcttcttcgagttagcaacactgaaacgcataaaggtggggtcgagagagcgccatagcaaacacttacctcctccagacatgatcttcttgaactcgtcctcccagtcggattcgagcatctcatccgcctcgtcaatgacggtgtatctgaaacctcattagtatccaatgactatggatgcatatcaagtgagttgcaatcatacctaacgcggcgcagagaaagaacatgagtctgtgccatgaaatcgagaagacggccgggagtggcaatcagaatgtcgcatcctttctgaagctcctcacgctggacacgagtaggggcaccgccataaacgacacacggacgcagcatggagcgatagcacaaacgacgcgcttcatcaaatatctgagttgccaactctcgagtggggcagacgatcagaaccagcggctctgctcgaacagcatcctcccggaggctaaagttcgccgtcgtgttaggacgaggagcagccagctttctcgccttgcccatcaacttggaaataatcggaatgaggaaggcccccgtctttccagagcctatgaaaattccgttaggaccaacttttgtcaaacatcagactgcgcaacacataccagtttgagcgactgcaataagatcaagattggctagaacagccgggattgcataagactgcactgcagtaggttggtcatagccgcagagacgaatgttgtcgagcatgaccggatgcaagccaaagtttgcccactatagatcgttagactggaacattgtcgctaactcatctcgcagactgacctcggtaactgccttgatctcgttaggactttcaatgttgaccttgtatctgttcaacctggagaagaagtcatgttagatatcaagttgatgtcccatcggatatgtcacttactcgtcgagcttggcgccagctcgagtaatcagctcgccatggaaaagctggtcctccaattcagggacggctgggccgacatcgccgtagtcatcctgccattcgtaacgggcagcaactccagcccagtcacgatgatccttgctgttagcaagctcggcatactcgaaaggaactggatcagtccagcccttgtcacgagcgaccttttgagcagcctcagggttgggaccgacaccagaaagaacgccggcaggcgcctcttcagcggcggaaccatgaacagaagcaacatcagcgtccaagacggagccagctgagccaatggctgagccagcaactgagccggcagccgagtcggcaaccgacacagcatcaggctcgtcgtaagatgaatccattgtacacgaaagtgtctcagatgattgggttcaagagaggcgatgaggtagagaacagggtggtggggagaagaggaaaggaaagggaaatgggcgaccgtggggttttatgtccgtacaagagcaaacgcagaaacgcgtgtagggcttaaacaagtgaatatggcgcgcaattgctttgtcggtcgccgactcagcgagtactcgattggtgactgcgatattgcgggaagtccgaagtatagggaagtgaaccggatgtacctttcccgactaggaaggagcgatccaggtatacttctatcctcatacaattcactactggtatggatgtacatggtctaacctttgctactactgtgctaaccattgagcttagcactttgatatgtgcagagtagtttgctttaacattcaatatcaagccgtctttcatctacctttgtctttctatacattcactcaagatatgcacctatacttatgctatatcggttttaagtacctcattctcaattctgatgcgacaaatgagaccttataaaagaaagcggactccttcttagcagcatatatatacttgctaatcattcagcgtagtactttgatgtaactatacagagtggtttgcctcaatcaatatcacgccgtctttcacctcctttgtctttcagctgcatattctactgatatatgcacctattactatgtccggtttaagtagtgattctcaattctgaatgtgaccttatgaaagaaagcagactccctcttagcatgtgtatacttccccaggctatccattagggcacgatcgacaaacctcgggacgttagctcctcggcttcccagggtgagaaagtggaccctcccgtagcccgtttcgggtagaaggagatatacgcagtaagcctgggaacgggtatcctcttcatctccagtgattccacctaggtaacccctgcacaacactcaccatggcctccgaacgaatggaggtcgataccaatgctcgccgcaagcgtccgaaccgcttggaagctgccatcaccaatcccggcgctgtcaaaatcaacgtcacgggcgcattcattgtcgacgacgaaccccgatccaagagtcccgtcgaagcagagggcgtacactatgagaacaaggacatccgacttccgcatcatacaggcgtcgtgagccatgtggctgtcgatgtgagttgcccggaatttattttctctcgtgccccgcactgcgaccggttcccccgcaatctagcggcctgcagataatttgttcacgatgctagaagaaggcatggctaatacagcattgggacctggtagattggcggaacacttgcgaagcttgtttatttcactcgagagctagagaccgcggataacggtggccgactcaatttcctcaacttcgaaacccaccggatcgatctgtgcatcaacttcattagacatcttaaggaggaacacgagaagcgcaatggctcaacacgggagggactatgtgtggtagctactgggggtggtgcatacaaatactacgatcggctgaaagaagaattaaacgttaatattctacgggaggaggagatggaatgtctgatcattggtaagtcgtggaacctgcacaagcatagagcatactatctaacatctccaaaaggactggactttttcattaccgaaattcccaacgaagtcttcacttacagcgacaccgatgctgagccactgcaatatgccgaagctcggcccgatgtctatccttacctcctcgtcaatataggatcaggtgtgtcgatgataaaagtctccggtccgaggcaattcgagcgtgtcggtggaacacatctcggtggtggaacgttctggggcattatgtcgttgttgaccggctcccggaccttcgacgacatgctagcaatggccgaccgcggagacaacagtgcagtggacatgcttgttggagatatctacggcatggactacaccaagattggtttgaagagcacagctattgccagtacttttgggaaggtgctgcggttgaaaaacgatgccgaacaagtggccgaggacggcgagggcttgattcgcgacgaccccagtgaagctagcgagtccaaccatggaatcaagcccaaaccggaagatatgagcaggagtctcctctatgccatcaggtatgtttcattatttccattcctatttccattctccgacggtctccgaactaacccggattagtaataatattggtcagatcgcatatctgcagtcagaaaaacactcagtcaaacatatttacttcggaggctcattcattcggggccaccggcaaacgatgaacaccctctcctacgccatccgcttctggtccaagggcgagaagcatgcgtatttcctgcgccacgagggctacctaggcgccgttggtgccttcatccaacgacagccgcaaaactggggccgcagaaacagtgttgacgacgttgtcgcaccgcaggcggtccggaacatcgttcaaaatagccatgtccttcagcaacatggcaggtcgtccagtgatctataaaatttgtgccagactaaaccattgtgaccctaccctctctttgctttgagtcctgataccccttgcaagcaatctttgaactaccaatattgtgccgagttcttttgtgcacccaaagtggctgctttaattggccacctgtgaaaaaccaacgtggcgattccgggcatttgtgcatgttgtacacttagatctatctgaagctttctagcttcctgtttgaatccaaacatgttcggttatcatgttagagaaataaatctaatatttcattccttttccgggcgtgtgccttgacatccgcctacgcgagattatccaattccgtgagaagatcgagttcgataaaaacggtggctttgttacgccaccgcttggagttgctctatcgaatgccctggttttcctggctatcgcctacatcgtgcccattcgccagcgcaaggcaaagtggccggctgacttcagtaccgacggggatctttacccggagaggtggccgaggggatgtatcattgtgctttgggcttttgggttgccgtttatccagagttactggaactcggaacagatatctcctatcagtccttcctggcgggggtagctctctcttcgaaagttgccacagtggtaccttatctcctggttgatccaagatttcacgcgaaaagtcggcttctgtcttcaggttcggggcgttcccttagatgacgaagaagcgaagctgtgccagccgaatatcgacgtcaagcgaggcttatctgcacttggtaggtgtgatcgatcccttctggcactcctggaacaaagattggcttgcgcggtagatcttgaggttttgctatcagatttgatttggtttcataggcttgatcatctccttatctagctataacgctgaaatgtaggaaaagatattaaacaaagacgtctcttataaaaagacattttgaaagacatttaacacgacatattgaataatcattcttggtctacaatgtaaaacatcacgttagagagacaatgatctcgccttagttctctcagtttgcatctgataatggattgcttgtgtttgcaatgcatgtgatgttgtcgaggggacgcccatttttactttcctggtattgtttgttcctgtctgctgtcacctaagtctcaccttcacattcatttgtgtgtctcacattcactcttattactgtggcttctcgtgtatttccccgcgcgtctttctaccttttacttgactattctatccttatctattctatccttattcttacaaatacggaggacttctctcaacttaaaagcctcatggcgcaatctccggctgctcaggatgcatctcgtctgtcgcctttccaggttgaggtgaccgagtatgcttgtccggactctgttctcgaagcaccggaagaaacccacgaacgactacgaacctcaacgccatcctatctcactgagatggacgagtcgatgctggaagatccgtcggatactgccacggtatcacagtcagtctcgaccgagagtcatttcatcagttctacagccccgcgtgtcagctatgaagtcaccgcgtctggcgaactcatgataacggaaggaatccaaacttccaacccaacgacgcctgcgcgtgggccccggcctggtcctccacctgcacttgtgtcctttgataggattgcccagggattaccgccaaagccggcatcctcatctaccacagcaacaactcaccctccatccctgtcagtggagcgcctcatcggcccaaagcagccgatccccgcgcgaatcctcgatcttttcgagcaatggcatgaggctgaacccaacaccgagcatcccgctgctctgactggccgtgctccatcaacatggaagaacttcagggctttcagtgatgatgccgacgagtgcgagctatcggtcttccagatattgctcaaatgtcaaaaccggcgcatcctctcgtatcgcattatgatacttcattcccagaatggaccagaggagctcgtcgtcttcggccaaccccggccgaagttcaagggaccctggaataagggtgtcaaggggctgtacctactggactggtcggaaatcgagaagaaaggagaggttcgggcgtgcggtatcaaactgtggagaaccgatgacaagaatattgcgttcagtgcctacatgtttgacgatggacgaaagtgcacccgcttcctcgatcacaatgctggaaataagcaagcctcatcttctactcccaagaaacagtctgacggaaatgagcatgttgaggacacccagtccatctcatccgagccaccgttttccccctcgagatctggacaccaaattcccagcagtctttccagagctgagaatgaaactgaagacagaaccccacgtgcctcacggtgggatcacccttcccccatgtgggctaagtccatctcacccgtccccactcccaataattacgatggattccgttctcttgcgagcccttggaagcctcaaaagaggcgccgtagctcatggagctccaatgaccaagactccgatcctattcgcttcaagttgatgtcggacgtgtctgatcaagtccgcgttttcaagacacttgacgcgaaggtgttgtttgaaaaggcctgggatttctacaagggcgtggataaccgcactggactgttgtgtaccattgctggtctcgacggagtccgatacgtgggagatgggtgtgtggatgaatttgatatccttcaggaggatattatgaagtcttcttgtggcgatgaagatcgcgtggttgaggtgaagcccgcaatgggcttctagatggccaaaatgggcttgtgggattgtgtgtggcggtaactttggccaatctctgcttctcgtctttcttgatgttgttggcctggtgtggtggttggcctagtggccattgtggtgatttcggccagtttattctgcaccggaaagcttcatccaaatcttttgtatctcgcctgcgcgtgtatgtatctgtacctaattcaaataaatgcaagaaaaaaaagaaatattacatttgtcagattatcccatgacccatgtaatcaactaacaacatccctctctaaattatgctgttattctttggcatagtccccattgatgtcaattatatatatttgaagtgaacaagttgtatataagctaggatgagctatgaatatttgacctcgctataccgggatacacaagctaaatacagtctacacctttaaaattgaaagcgtccgaggccttctatcccataagaaacgaatcccagcgactcatccaaccagaagaaagggctgacatggtcacgtgtagatatagctcactgctgaatcagcatctagatgcacgcgggttgcgccctcgttgacaacagccgtcacatctaccttacacatcgggcttaatttcttctcacaccatgccgcgacgctagttctacctttgcccgatgacgtctcctccttcgctagactccttcgctcccccgatccccgtcgaaacccattcaaaccgcaccccggagtctcctgagctcgaacggtccctgcccgaccccaatcgattagcgcccgaggatgcgtacttcgcaaacccactcttgcgcgcccgatcggcgcccagcaactaccaggaaaacttacgatcgttgaacggcgatagcagtgtgcatattgggtctgctgcggcgttgcgcaagaagttgggcggtgctggacggcgtcggaagcggaagggtgcttggaagaagttgttatgggttaagcaatcatgtatgtatgcgtgtgggtcgagaccttgtacagggcttgagcttggtgttgcgctgttgctgacggccgattcatagatcccgataactataccgacacggaaacgtttctagatcaccttcagcgcaatcctcgagtgcggccgtatgacttctggcctctggtggctgattcgactgtgattgtgcagcatgtgtgctcggtggttatcttcgtttgctgcttcgttggcattgtccaagatcgagtgagccctgtctcgattgtctgctggggtagtgttggtacggctatgggctggattctgtgggataattggatctggaacgagcatcaggaatccgtgcaaagtgcagatggaattactggaggtgatgatggatccagttcgacttcatttgctagccccatcgatacaccctccaatgacacacaatccgatgatccgaagacgaatgccattcatggcctggggctgtctatttccgggaatgaatcgaaagagcaactagcccgtcgcagtgcggatttcagcgaaagcatcgacgctgtggctcatttgacagcgcaaagtgctgtgccgcctggcccgggcagctccatcattggcactacggacccgtcgatatcgcaatatacccaccgcgtttcgatgctatcaccgcgcaaccgccagcgcttgactacagtcaagtcggccttccttatttacttcgccctcttgggcctcagtcccatcttgaaatctcttaccaagtccaccgccagcgactctatctgggcgatgagctgctggcttttaattatgaatatattctctttcgactacgggagcggggaaggcgctggcgccaccacgaaattccctgcttctttgtccacgaacgcagccgtgatggcatcgactgtgctcgcgtcccggctgccgtctacgacacacgtgttcagtctcatgctgttctcgatggaagtattcgggctattccccatcttccggcgccaactgcgacagaaatcctggactggccatgtgctcctgacactgacccttgtgatcgttgccggtggtgctgttggtgtcacgctgagtggcggatgggcagcagccataattggatcagtcctgggaagcatcttgactgcatttgtcatgggcgggtgcagttggtggcttatcagcttgcaaaagtacaagaacgtcgtgatcggtccctgggaccctgctcggccgatcattcggcgtcactggaactaagcccatatgtgatgtcttttagcgccattgtaatatagtttgtcggcgtttggttcgatcttcttgttgcttataccccttgatcagtctatccatttgaaacatcgtggaggtttcaactgccttctttccgtgtatcagttttgccacggctcaagccggtgctcgtagagtcaggtcctgacgtgattcatattcttcaaggaatacttccagaaatcctgggcatcaaatccggttttcatttcaatgatcattaggttcaaataaggggggaatgcgggttcaagaggaatgcaagacacatctggcatactaaccttgtacattgtccaccgttgaacttgccgccatatacctgcgaaggaaaagcgtttgatatttgaaacgtttcaatcagggtcatggacccttagtctatttttgtctattctcattgggggcagtatctcgttcgaacagcctcaagggacttggcattccgcagccactcatttagcgcctagaacccttttttcccccagggggctttctgactccattgattgaccagacagctggccactgatacgacattcccaaacggaatggtccacatgccccgcatgcacagagacacatgttcgacggcctgagacgattatcctggcatgtctttgtgcagaacaggaatataaacctgaccttcttctgttcctgatgtctgtctctattcttccttctgcttactttgttcgcggcttgaagctgcttctcgactctcaacgacaggctggatatctgtttatacattctttcctgatccctggatctaccttacgacctgataaacatatcgtaacgaccgtcatctaattgattccatcatgttaaaacgactcgcacttggcctgctggccgctcagtccgtggctgccacgcgctttgccatgtacatcgacgagttagtacaaacttgcggaattgatctacataccctgaacccacagctaatacttgcccaagataccatgtaaccgctctgtcgggccagaaccagaccgagggtatcgactatgcaattatgagcttcgctgcctcgaagctattcaactcagactcgcccgcagcatacaagccatttgagtcgcccgagaccatgcgcaagcgcttcagctccggtaccaagctaatggtcgctattggcggctggggcgacaccgctggcttctctgagggagcaaaggatgcggcttcgcgcacgcgatatgccaagaatgtcgcttccatgctcgacgcaaatggattcgacggtgtcggtaagatatcccaacaatgcgttctggatataaaagaagaagcaaggtactaacctatatgaacagacattgactgggaataccctggcggtaacggccaagactacaaagacgtgcccaactcgaagaaagtggacgaaatcgaaacctaccctcttttcctcgaagctgtccgcaaagcaatcggcaacaagaccctctctattgcagtgcccggccgtaagcaggacttcattgccttcactaaggagcagggtcctaagatcttcaagtctgtcgatatggtcaatgtcatgtcctatgatctgattaaccgccgtgataacgttaccggccacgctagcggtgtccagggatccttggataccattaacgagtatatcgccatcggggctgatcctgcaaagctcaaccttggcttcgcgtactacgcgaagtggtttaccaccgaccccaattccgattgtgatgagaaccctctcggctgccatcttgccaagctcgaaaacgacgatggaacagacaatggcaagtctggtgctatgactttcgaagctagtactgctgccgctgcgcctaaggatctgaagcaaagcaccgatggattgtgcggatttggagcgaaggccaagtgcccatcgggacagtgctgcagttcttccggctactggtatgcataacatcatttaattctgatcagtatctagactaaccccttacagcggtactggcgatgatttctgtcaggctgggtgtctctcagactacggtacctgcaagggcatctccatcaccgactcatggcgcaaagcccagaaggacggcaagaccgacgagaagggtggtggtcagtactactttgacagcgataataatctcttctggacctgggatacacccgagttgattgcccgcaagttcaaggaaattgtcgcggagaagaagcttggtggtgtcatggcttggagcttgggcgaggatacctacaagttcgagcacttggaggctatgcagaagggtctcaagtctcactctcccaaagtcgcggagcccccccaatgaccgacagagactgtgcctagtagctagatgcagttatcattgatggtgagtcggagttggagctcagcttgtgaaatataccaaactgcttttactgtctattcgattcccctttttgcttcatttcatctctacatctcttctattgcccatgtctacactatcaatgtcctcatagtcatcttaatatctttcttcggttgaatgccggggtaaaattcaaatcaccatcatattccctattcgctattcattcggtagtccaccgacccatccatgactcaatgtacctctgcaccaagccaccagcaacgggatcctcaacacaagcaagatatgggcagtcctgaaccgtccgctcggtttcgaaagtaagaccagcgtcttcaataccgcttggtcctgtctctgacaggccatgacttgcatacttagccgtccagaaatcgatgagcttcatactcggatttttctccgggtcctggtcactactcgccaatctcctcagccactcctgcggagatacaacctcaaactccggcaagatagatccatccctcagagcaggaagcaaatcctccttccagctaaatgtccgcggattaaccaaatggtacaccatattggcttcggaagattcagcgacattcatggcgatatccgaaatagcccgagcacactgatcaacaggcagccagctcagccgctcattcagctctggcaatgcaccagtcgtcaatgcacttcggaacataagcgaaacagcttccgtttcattccattgcgcgctaaacgtatcgccaccaagctgaccgattctcagaacgcgagcttgcatgcccgtctgccgcatagcgttacgggtgatgtgttctgtaaccagctttgacctgccatatcccattttctgtgcgtgctccaagttctccagtatcgtctccggaatcgatgccggtttgggtgtgttgcttgcagcgcttacactggagcagaagaagaagcgcgcaggggacggtaggagggagcgtaggcagagattgatgaggttgtgtgttccgcgtatatgctgttgctcgaaggaccgtacgcctaggttgaagttcaccgcccaggcactgtggatgacgcatgtcaaggatgacagtaagtgttgcaaatcgtggtctttcagaccgaggttcgactgtgacaagtcaccggggatggcgtgaagctttgcggcttcggcatcagtgagagtgatgttgcggtcagctagtgatttgtagagacgagctcctgccgctgcttgtcctggtgcgcgcacgattgcccagacttcggagactgttggtcgccttagtaattccgagacgatgaaggctcccaggttgccggttgcgccggtgaccaccacaacctctgtttctgggctttgggtgatggttgggaagtgttgagtgaagtgggagtacttttcgatcatttcgcgcatggaatcaagctcatcttccttctcggattcttcaccagttcgcagctgatagaggtgctttgcaagcgccttgacagtgcctttttcgaacacaatgttctgggaaagctgatctcctcgctcggcgatatcaatatcgcgcatgatgaacctccagatttgtgtggtctgcaagctgtccactcctgccgagaagatgtcggcttcggcatcgggtattggtacgcccaagtcttccctgaatcttgaaagcagccaatcctccagttctgagacattgagagagagggaacctcctttctggccactcccctcgaacttggcatatacctgcttgatatcctcctcaaattgctgataaacctgacctcgtatacaggttcctttatcagttctggggtatacaacatcagcacccttaattatgaccaactcctttgggatacgggagaatgtctcggcgcgagaatttgctacttcaaccgctggccagatagcttccaaaaattcctcgtcgctcaagtgaggcaccttgccaggagcacggaaaattaatgcaccaggcaccgtccgctggaagccgaacacaacgcaatcactcacgataggctcttctctaacgcgaccctcgataggaataggaagcaccttttcaccgttgaccagcgtgattcgatcatccagccgactcaaatacttgtaataattgctcttcgctggatccgggtgtctggtgaacaaatcggctgttctgaaagagttttctgggttcttcgcgctatacggtggctttgaatttgacgggcccttgctcggcaggccgtccaatgcgacacattcaaaaaccccaggcgagatctcatccattagagtgaggtcggcaatgggacgatgcagtcgtgtatactgccactctttatcttccggagctcggaaagaagtcatgatttgtcctgtctccgttgctccatagttggcaactagattcacgccctgtgccacaagacggtcaccaaggtcgtctgggcagctggagccaccatatagcacaagctgcggtctggctagtgcttggataccttcttgcttctctgccagtagtttgatgacatatggcacggcactgatttgctgtggatgggccatctggagcgcatcgaaaagattttggtatgtgactggaagagaatggtttcccaggtacgctgtcgctcttgtaaagaatgcccgtccaaactccatcagagcatgggagtggaagagtgggctgatagtgaagaggcgtaggccgaagctcttgcggaaattggctagagtttgaaggttggtaaggaaaatcggcttcgggaaaccggtactcccagaggaatgtaggatccaagcgatcttcttgccttctcgtgatggatccgcaccctggcgttcaaatagaggcgtgctaacaggtcgattgaaccagtcctctctttgtagtagagagaagctaccgcaaccaggacgctcggtacaaatttcagttacaacttgctgaaattgcctcgtgttgataatctggttgcaatttgccatctccattagccgggcataagccggggctgtaagacgtgtagacaagaaaagcacagcatagccaagacgattcagcgcgaagaaagtcaccacgacctcgaagctagatccagctagcatagcaataacaggcgcctgctcgagcctcgggtcctaggggataattagtctagtttgacacaagaaactggctttcttcttaccgcgggtaggagaccttgcttcatgtaaaagcgaacagcgatatcagtataccgattgatgtcaccggctgtatgttcttcgaaatcagccgcttcacgaaccggatagcatatcaaaggcctttgtgcttcatcttgctgagcggcatgggattttaatagaccatcgatggtggcgaactgttcaaacgccggccactgggaatgaagcgtcccgtttaacaggcgagtcgcgatatcttttgtctggagtggctccacgcccccttgggtagtcgtgatggttactgtagtcatgattgttgtgtaaaataccattaacagtccattgactcgagatcgctttatacctggcggaaaagcctcacgttggggtaatcccacgcatcgcgggtgcttttccgggtttccgcgtggatgccccggaaaacacttaaccccagatttggatccccgcactatttccaggtttcaatcgaggattctcatgtaaatgttggtgaaattggccatattgtaatgataggtgcagataacttcgccgtatgagatgagacgaggtgttgattacgttgatggctcggatatccgagatggcaatgcatatcaggccaaaataagacatcaaattcaggcatcgaattcaggcatgaatattgtgatgacataatcacaggctactaactagcctgaggccacacgccaagagttcacatattacctccctacaacttgcaagcgagaagattcacagatatattaaacaaggaaaccaaaaaaacgaacgcataagagataaaaagtagtcaacatgttgtaaggatctttttttggctggcgcaaacaggatagttcttccaaagctgcctgaagccctatattgactactcaaggctaggaaaagacagagacatcacatttgccatcactccacttcacagcctgttccttggtaggatacacatggacaaatgccaagtacggtgatttatccgagcctttctgatcactgcacgcctgctggaagcgggcggtcaaatcctcctcctttgatgctggagttgtcaaaaagcaagcgcgttcgcaaagttttcctttcatcttgtcgcaaacagcctttcgcttttcggcgaccgtgtctggtaagtcaacaccagtacaacgggcttcaacataacgagtcgaatcaagagtgctaggatcgcaaaccatccgcacaccacctgcctccatcacgacgctccatttgcctcccagacaattatcatcgcaacctttgttggtgcggcagtcttgaccaggggtgtattttgcagtagctgacgcagcaaagagcgtggtgatggcgagaaacagcttcatgatgccttttggttgcacgaaggtagggcctgtaatttagttagtgaaatgcatggacgcagtcaacgaggcttcagaagcttactatggggcggaggatggataaattatgatgcaagtcaggaaatggggtagaggattcgttgtatgggggaaaaagaagctatgagaggagggagcgagacctccttatttatgataagaaagagcgttccatgttgaagaaagcgagtgagttgctttttcctatacctagtttgttcaatgcctcgcatttctcatccagctgaaatgtgggactaatcctagttaggtacctgaataatgcagggcaaaagcttgagtatcatgccggtaactgtaagggagaggtccggccaaatcgtgaatactctacaataggaagacaggtcccacgacgtcggctacctgcctcctatgtattgtcgatcattgtcgatcgtatatctcaatctacagaacatggaattctggcaggaatacttgcagatcattcaaccttgcatgatcagcgggaaactactcaaaaaccatcaatagtcgaaccttaagagcataattggaaagctaatatgtataggctacaggagattcgagtgaattagtccggcgacaaccatctggtctctctccttgaagacaagctccagtcttctgttacaaaacatctacctcttcaagtcaatcaacatgaaatccacttttcttgtttctcttatacctttcatacagggtgttctgggctctgtagaagtcctaggtggctcacctgttacgattgatgaccttccctacctggccagcatttcgaaatcaggcgtctatacctgtgctagtgttattatcagcaacgaccgtgtcgttacttccgtgcagtgcgtttatggcctagagtcacaacccacgagcctttccgtgagaacaggctcaagcaaaacgtcttctgggggatctgcatggacagtatcaaagatgatcggaatgctcggtttaacactgacaccaatgattttgactttgccgtgctcgaactattttctcctctcgtacccggcccgactgtcaagccgattgaatttattcagtctggtcaggagccagaggatgggactgaatgcgtagcttccggctggggtgactcgggagaacaattacaatcggttacactccctatcgtgaaccgagaagaatgtaatcagacttatgccggccaaatcaccgaccttatgatctgtgctggctcagaagctgggaaaggtacctgtccaggggaccgtggtggcccggttacttaggtggtaaatttgctggaatcatctctcaaactaatagatgccaactacttggtcgtctagacgttttcaccgatgttgccaactcttctattcaatcttggatacaggatcagtaatgacaactcgcagcaggtatttgcccactgaggttctgcgccaaaagacagaacatggtagatgaatactgtagagtttcaaggaccgtcacaatttcaatgttgaatttagcgaacagcgtttataaaagcccaaactaggagcaccaaagtgagcattgacttgattgagcatctatttattgaagtcagggaatgtaactcccgcaagttctcaatataattgcttcgcttcgctccgcaataataaatattgtacgaaaagtatcaatgtataaaaaatgtggcaaaacagaacacttgcttaccaatcgagctcctttgttatgtagttacatggttcaagtctattagtaaaagattcactgtacacatctaaattctaatatacatcttgtcactttaaacacggcacaagcgaccattctgatcgggaaggccatcaaggctcttgacaacccaatcctcactgccaacagcagtaggcgcatagaacaagccagtcgggtcataccgctgcttaatcttatacaagcggccgtagttggtaccatagaaagcctgctcgaacttcggttcgttgatatccgactcggacatgtatgcgccagagtcagggcaaacagcgcgccacttgccaacggcatcggtgaggccctccatcttgactttgatatcggcatcggaggcggtatctgtccaggacgtcgacgtgatggcgtgcatcaccgcctggcggaaggctgggtttgcagaattgggggtgaagccctcttgcagctcggctttcaggttgaatgcgagcaatgcgaagccgtcagtaagagtggagcgcagggcagcgaaggtagcgttgaatgaggtgggggtggcccaattggcccgtgggaagaggcgagagccggtcatcatagttggtgaggcgactgattcgagagggaatccggccatccaggcgtcgtagtagttgtcgtagtaggtcgtgtttggctggattgcgatgcctagctcttggaggtcatcgtaccatggcttgactagggtgttgaactggtccacggtgtggttgacggcgaagaaggggttcattatgaaggtgaaggcgtcagtgcctgtgggcagcacccaaaagtaggcgtaggtgccggcgtcggcgtgggtggggaagcgctccaagtatgatcggacgccagcaaagaaggtgtccacagagatattctcgccagttgagaagctaaatgtcgaaagagtcacaccgaccttaggatagacacgagagataatagaagtgacgactccataggttcctgatgggaatatgttagatgaaattcgagaagagaaagcgagagaaagtacacataccgccgccaccgccacgcagagcccagaatagatcgggattactttctttggtcactgtgacgaagcgtccgttggccagcacgacctcaagggccaagacttgatcagcagccaggccgtacacgctagacatgggcgaatgaccgccgccgagaacgtagccaccggcaacaccgacagtctaataaagtcagttatctcaccaaacgatgatcctttcggactgaccaactcaccttgccttcgccaccaacagcggtgaatccgagttccttactcttctcatagacttcaaatgcctgcacacctgaccccagcttgacaacgggaccctggtagccggagccgctatagttttcaatgtagtcaatgtccttaaggtggtgagtccagatacccaaagcaccagcaccggttgattttccattgaagtcatgcccggtgttcttaaccactagacggatgtccgcgttgcgtgcaaagttgacagcaagctggatttgagctacagtgctcacattcacagcatagctgctgtagccaccgacagtgcaagatgcagaggcattggtagtgggaaggcaggttcttccctcaaacagaggccacattgccgaggctgggtcagcagcactaatcgtagaatcagtataggtccatgtttgatagttacaggagtagggtgtgactaactgaagattagagtcgttccaatccgaggtaactctctcgcattcggcgctgtcatattcgggccatgaagaatagcaagacgccgctagggggaccgtcttgatcagcgcgccaccgaggaggttgtccaaggtcgaccatgcagactgcgacggccaatagcggtcaccggggaaaaccttgcattgccctgaagacagcgtggtcttatcagtgccattgctatcgccaaatttaaccagggctgactgctgtcggttgagcttcgcaatttcgcgatctgtcaattgaaccttctcactgtcaaacagcggtgcaccagccgaagcctgaccagcgcgggcatgtccgggggtgactagtaggagagcaccgagcaaaacgctcgttatagtcgaacaaggagacatggtgagcgtgtgaatgggaagaagctacaccggggatcggcatgattgggaaaaagtggccaatggagaccttttaaatcaattctccggcgctcgccagcataaaatgtgcatggtacgatatactagttagcgcaacgtggatagtactttcgtcgctatgaggttggcatccaagaggaaaaggcgcttgtttacttcgcccccacagcaatttagaatgtctcgctcaagccctctcccactccacctctcgtgtatctcttccaacgagaatcgaaatttgcatgaagctagagctagagatggtcttttctccgggcctccccgttcggcaaaataaataaagccacactctacctgtgacgcgcggaacgagtccttgccgtgttgttgagaatacaagtccaaccgagactgtcgccattagcttatttccattcagtgcggagtactccggatagcgtaagcaaccgtgcctattcccactctactccgtaccggtcgggatgatcagggtttcgatcttgtctggttctcttgttctctcgttctctccacggccgagagagtgttgcaaggaacaacgcaagccaagaactactccgtacaagatacgtgaacaaccgctactccgtgtacgaacggagtttttcttttcggcttgaccctacggagtaaacatggtctggccgggctccattctccatcccccgtccgcgatggtccactatgctccacctaagtacggagtactagatccgatctgctttctgggcaatgagaaccttgagtgcaagggactagtaggatgttgcatttcatctaattttgccaagggtcagaactaaaaaaactaatgaaaacttgttaaatgacgcagaaccgggaatttcgtcgtgggggccaaatatatacggagtgttgtgtccgagatatcgagctagaccgatgcactcatacacactatcgctgacgtttgatccttgatgatccaccattgagcacattcctgtactcactgaaataggcacttgtccaaattcaataacaccggcataagtgtataattgggggagttctcactcccgcccttttcgtcctccttatacaacataaggatgagctgcggatgtaacgctgcaagaaacgattaagctttgactagttagcttgcgagaggtgactgctctcggtatgcaagtagtatcctgtacctgcactagatgaggaatcgcatattacttcctgttacggacaattcttcagagcctagggtttcaatcccacttgaacacaatgaaacaatgcactactcaagcagcgaggacctgctcttctggtttctgtctaggagtcaaactaagaaggactcctccaatctaaaggacgcgtgcatccctgcacgccatgcattattggctctccccttgattaccggcatcataggtcaacggaaatagagccaattgggacacgaaggccgcgacttaaattagatcaatcaataaagtgtttatctaggtagaaacccttggaatggcccccgaacttcaaaagctaaagccaaataagtggatcatcgttgccgatcctaagtcgctgtgttggccgcagtaccagccttgcatcttaagatcgaaggtgcaggctgttcgagaactattacgttcttccgggtgtttatacaatggttgacgaccatcaacataaaacagccctagggattgtcgtcgcattcacggccctcggtggcattgctgttctacttcggctctggagccgatggctatcacgatcggcactcaccagtggtatggaacgaacgctcagatcggcactggaattgaaccattagaagtggttgctaacgagactcccgacagatgactgcttcattgttgtgggatatgtaagatcgtcaaattccagatccttgaagagtgtatgctaaatgggtattctctagatcatctccatctgccagtctattacctcgtggtactgtaagtgatgtgattcatctaagaaacagaagtgagcaactgctaattaaatcagacatcaaaaccaattatgtcggctttcatatttgggatatccccaaagacttcaatcccagacctgggatgaatgtaagtctactacccagcgcccgtaatagccagaggctcacggacaaaacagtggaacttcgcaaatcagattctctacaatccagccttgaccgtggtaaagctgtcaatattgttgttcctgcgccgactcgattcgcgctcacgggtggtcaaatacctcacctggagctcgttcgccgtggtaatcactctttttatgaccgttctcctcgtcgacatttttcaatgcaatccagtagcatacgtctacgacacgacgatcccgggcggaaaatgcatcaaccaaggcgcattctacgtctcaaccgcagcgctaaacctcttcaccgatataatggtcctctcaatcccggtcataatcactgcgcgccttcaaatgcccctccgacgcaagattgccgtgtgtatcatcctatgcctaggcggagtgtaagtaaacccccgaaatccaaccccaaccacccatcatacaccgcacacagcaatctgacacatccaaccaacagagcaaccgccgtcggagtctggcgaatcgtaatgctcgcccaagcatttctctccaacaccccaaacccagacccaacttacgcaatcggcttctgcagctccgcagtcgaaataaacgtcgcagtggtatcagcctgcggtccgtccctgaaagccatcagcagcaggatattccccaaactgctcggcagctcgcgagggaaatccacctactacggcgccggcaccggctccggcaccggcgtgggctcacgcagactccgctcgaatgcgttcaagtctacctcacacgcccagcaatcagtgtactccacccgcggcgcagattacgagatggccgatccgctgggcgggccgcgtgttgatgttgttggggattttgaaatgcgcaagtataagcgtgggggtagtgatagtggtctgagtagtgaggatggtaagggcattatgaagacgactgatatctcggtcggatatagtatggagccccgggtggaggatggtcggtcgcacgatggtaggccggccagtgtagatagtatagtttaatcaccttatatacaacatagatacgatttacgaattcaaatggccaatagcctacttgaagaagaaggatatcaaaatggaccgaggatctactccaatttcggatatgaggggttactctgcgtacataaggtatggggtttcccctcttataacatcacttacctggtcaattcagtaaatttgacttgttttcatattcaactcattcttgattcatcgatatggcgactcagtaccagctaccattcaaggtatggcttttatccctccgcggggttcggcgagatgtccgaagtgttgagctaacacgactttttccagctcgcggatcctagtctgctgaaattcgactccattgtcggcgacaaatgggtcggtgcaaagagcggaaagcggtttgaagtactcggtaggtgaaagtgcattatcctccaagagctcacaactaacatctcccacgcagaccccggcaccgacaaagcgtgggccagctgccccgccaacgcagcagaagatgtatccgccgccgtggaaaattcccacgcagccttcgagcaattccgcaaagtcaacccacgccaacgcgccaagtggctactaggatggtacaacctaactgtcgcggcccgcgacgacctcgcccagatcgtaacctacgaaaccggaaagccgctggcagaagcatacggcgagattgactactccctgggcttcctatggtggttcgccggagaagcagagcgcatccagggcagcgtatcaacagccgccgcaccaaaccgtcgtctgttcaccatcaagcagccgattggcgtagcagccgctctcgtcccgtggaacttccccgttgccatggttctacggaaagtcggtgccgcactagcggctggctgcacgatggtcgtcaaacccagtcccgagacgccgatttcggcgctcgtgctggcagagctggcgcatcgcgctggaatccctgctggtgtgctgaatgtgctcactacggacttggagaataccccggctctgagtgaggcgttatgtaagcacccgcttgtcaagaaggtgacgttcacaggctcgacacggataggtaagttggtggctgcgcactgtgcgcatggtcttaagaaagtgactctcgagctcggcgggaattgtccattccttgttttcgacgatgcgaatctcgatcaggccgttgagcagctgatgtcgctgaaatggcgccatgccggccaggcttgtatcactgccaatcgaatctatgtgcaggctggggtttatgatcgcttcgccgctcttctgaaggagcgcactgctgcgatagttgttggtcatggtgccgcggctaacaccacgatgggaccgttgacgacacctcgcagtcttgataaggcctctgcgcaagttgaagatgctcgtcgcctcggtgctgatgttattttgggtggtaattctctgacctcgaagccgggttatttcttcgagcctacaatcttgtcaggaatgaccgcggacatggccatctcgcatgaggaatcgtttgcgccgattgctgcgctgtatcgattcgatactgaggatcaggctgtcaagctggctaatgataccagtatgggtctggccagttatgctttcaccaagaatatcgatcgcatgtggcgactcttggaaaacttggaggcgggaatgatcggaatgaatacaggtgggcttcctatgatcaagtccaataattctaatcaatctaacgaattcgcacaggcaactcatcggctgccgagtcgcctttcggtggtcttaaggagtctggttatggcaaagagagtggaaaagacgtggctgtcaatgagtacttggtcaccaagacaggtaccttgacaattgagggacaatattgagtacacaacatagtacatatgcattctttatagatcatctcgatcatcttgaactgaaatgaaattcatgtattttcttggttgtgattggtcagctgaatccacttcaagcactgattggctacaatccggggagatcttttcaatatcagattttcttcactacaccaactattcttctcatcatggaccaccttagtccgctacgacgcctgattcagtctcacccgcttattgacagtcattcccacaacctactgaaccgcgaatcagccgccgactatgaaaattacccgttggaagccatcgcctcctcagcagacggtcgggccttagaaaatgcacgcaccgccctcccctcgctgagggccataacccagctctccgagctgtacgacctcccatgcacaaactggaaagacatacaagctgcccatgatctctacgtcagcgaagactacgaaaacttaatccggaaatctctatcaggcacacacgcactgctactcgatgatgttctcagctacgacgaagacatcgcatcatctagctggcacgataaattcaccatctccgggacaaaacggatcgtacatatcgaagccatggctgaggccacaatcctgcaggtatcgaactcgcgcaagaacggcgaatcagtttggaacagtttccgacagcgattccaggacgctctcggcgaggccctggacgatgccaacatcgttgggtttaaatcggaaatctgctgtcggaccggattggacgtggatgcgtattcctctgatgataccactctgggcgggtcattgattcgcatcctcgattccggcacaacaaggtctggcttcgcagtcgatgataaacatatatgtgactggatagtccagcagacgctaaaagcgatctgctttaaaaagagagccggtgttgtgaaacccttgctgttccataccggcttgggagataatcggattaatcttttgcgagctaaccctgcatgtctgcagcctttgatcgcgcagtacgctgacgcggacatcgtgttgttacatgctggatatccttacacacgcgaggcgggttatctggcatcagcttatcccaatgtctatcttgaccttgggaaggtctttcccttggttagccgagaggcgcaggtgaaagtcctgagagagagtctggaacttgcgcccaccaaccgtctgctctggggtaccagtggccggtttcacccggagacgttctggttggctaatcgacagttccgccaggctcttgagacggttagttcctggactgcctcctattaattacctttccctatgctaattttcttctgttttgcaggttctcgtggagtatgttgaatctggcgacttcactgcgtcccatgccatgaagatagcagcagatgttctgttctataactccaatcggctttacggcctcgacttgactccatcatacacacctggagagtaaactgctgactatgcgaggatgtagagcccgaaggtatgtccatgtctttcatttctattccccagatgcatcctgacaattatctcgtcagttgatgcttctactctcacgctctcctaatgtacttgatattgcaaccccgctgtcaaaattgattatcaatctttgagattctcagaatctctcgaaggcgatacggacctggaagcactgctagcgtcggagcataggaataactacgtttcgtgaggtaactgaacctcgcatccaccccgaataaggctatactgctccgtattaagacgaaattttgaaccagttcatacgatgacgtcattgtagttgtaatgtttaccttagcaatttgcaacacacccaacgtcaaagtgtgtaaagataaccgtctcgtcaacaacccaagagatagcggcggctgccgctttcggccgttgagatttatattacgcgaagacattaccgtgatgctggtgatcgtgctgaagagttgttagccatttaaaaaagcctgaaccagatcgacatagtggatcatttaggacacgcccgagctcacattgcctttgtacgtttgtcccaattacacatgataagttgcgaagatggtcaaatttccttgcatggaaaaaattctacaatctaccagaagggggcgttttcacgtgttgcatcccatcccatattacgcggtttctatacattagacgttctcggaaacgcaaatggaagcttgggaagttataggaatcgtttcatctgacattaaaatccgaagctatgcgttatgaggcacttgctggcagtatgagaagatattcataaccctctgggagcttgcccaatggccaatcccacttcttctcgaccaccgccagcgccttcaatggctctttgtggtccacgaagaacttggtattcacgcccgaaacaatcccagtcgtatccttgccgtcgaatatgattccacacagctcagcatctcgaatgtaaggcaccggggaggtcgacatggtttcattggcgttcttagcaatgaaatcaaggtctaccttttcgatagttcctactcaggataagtatcacgcctccagagctttttgtgtgggacttactatcaaaagctttgacggcagctagacaggcagctggatgtgagctcatcacgccgtatatagtatcatggtctgtcctgagtattcgcaaaagactagtcgcaaatcctttgccacggtggtgccgatcgaccactaattgagtgatccagcaaacagtcccacccttgcaagtccagcggcagccgaatgcatgtccgacaagttttccttcgataatcaccctgctgtatgtagaaactcccaccactttcgtcggagcttgtgggtaggtattgttcgcgtagtcttcgcacatttaacttaaccggctttcctactaaaagttagatgttttggaaagaaagcttttgacttactcaccgggattacttgaaaactcgccccaatgtgccatagttttccttgaagagctgagtggccttgatcagtatgtcgtccgtaacgttctccgcagggatcgtctcgtagatttgtgacgccatgctgaagtgtctttgaacattagtactttcaatgagttcaaagtgagttgactccgcgggaataggatgagttatgacgatggtttatgcaagtccccgttggcgtacatgtgagggggagggctcgtttatgtaccacaaaaatatgaatctttccatgcaaaagttaccagtatgtatattgaattctcgtttctcatattagaacggaatgtgatcgtgatttttttttccatgccgtccttccctcgtcccaaatcgtatacatatcgcaaggtcagcagaacaatccagcgccacctgaagtaacagacatctatgtgcgaataaatttcaatcatcggatcaaatccaaatataagacacgcgtataccatcgcgagggtatatcgttgcacgtcgtccgattttgagcgtcgtggaagaagcgaaagcaaaaataaaaggtataccaaccccagccgtcgcttcccgtgtatccagcgttggtctggtacaatgcagtgttaatcaataaatagctcaaacaatagcagttgttggaatgtgtgtgtgtgtgggatatggtggggggagagagagagacagaggaggagaaatcaaaatgtccattgtctgatatgatagtattgataatgttataacaacacaatcaacaccgatcacttcttcaggtcaacgacagattgatatcatagggctatgatgagtacaaaaaagaaagaaaagaaaaaaaagccaaaaacagtggtacatttcgtgtgcggtttggtagggtgtgagagtgagagaatgtgagagtgagaggatgagaggaagaagaaagaagtagggaggtagatgtatgctcgagacaagagatcctaagagccaaggccatcggacacatcatcgcaagcaaaaacaaaggggtaaaggatggaaaccagcaaacaaaacgaggatttcaaaaaaaaagctcgcacgccgaaccaaaatggacaaaacaatgctagttcaacatgccatcttccgttctgttaccatttcatccctttcccactcatctagtagtcgtgctacttctctgaaagataccggttttgtaaggaatagatccacaccagaagccatagcatccgactcatcgcgagagctgctgagtccggtcaaggcaatgatgatagccggcttgcggccatctatatccctctcgagagagcgaatagcacgagtagcctcgaacccattcatgacaggcatcgacatgtccatgaagatgatatcataaccactctgcatgcgctccactgcctcaacggccaccttgccattatcggctgggtccagctcggtcagctggcgctttttgaggaacgtcatcatcaggttgaggtttatgcgattatcgtcaaccacaagcacccgggctagtcgtcgagggcggatttcaccctctatcagtggtgctggtagaggggattctccaatctcctcgggcaatgtgctgattcttgagggatgttgcagtggtgatatcgtcatggggcggactccgggacagtctgccagttcgggggcgctatgggcatcggcaggggatatgagaggcgaatcgagtgcggatggtaacgaggacgtcctaatcggtagactcattggtttcagagcggaagacggcgtcgcagatgtcgattggccgtgggtcaaacacctcatgatgcttcgggctaatttgtgtggcccacagggacgccggatgatattcacggaggaagcaagaggcatccactcggattttgcaccagtataatccattgacttgtggcataggacgagaagagcaggcaaggtggctgtgggtgcaatggtgcggaagtttggtaaatcgttttcatccataagcacaagatcaacatcggcttccggtgtccatgcgacgatctgtatagcataccagtctaaaaggtatcgagcaatttcagaccagtgagagtcggcagtcacgtcggttgggtcgatgccccagatggaggctcgtctaccagggtatgcttcgcgtagtagaagagtttgcgccaaggtttctctttgttggataagctgaccagatggttcgacgggcgggctttccttgccaacaggccgctctaggggtagagatacatgtacaacagtgccctccccaggacggctacgaattcgaatgcttccattcagagctttgaccaaactgcgaacaattgaaagtcccagtccagtaccgacagccaaggcgtcttcctgagcaaaaggcgtgtaaagcttgctgcgcaaaaattcttccgatatacctttgcccgtgtcagttactgtcaacgtgaccaagtcttcgaggccttgccgccgagatcgtccttcagattgactagatgctgacaaggataaagtgacacggccagagtctgtgtatttcatggcatttccaaaaacattcataatgatgcgtcgcaaagcccccggctgtgtccggtagacccaatcccggaatgagacatcgattacaacttcgacgttggaccggtgattctgcgactttgtttgatgtggcatcaatacgggcaggtccgccgaggcagtagagctctggccgtacacatggccaaggcagatgccttcaacgacttcctcggcaagaatggccacatcggtagccacgagcgtatccagatgatgcggcaacttgtcggatcctttgaaatcgagcggcgactctttcttgcgtctcattgtccgccaggtcctttccaaagataccactttgctgaagtcaagtacctggttcattgtatccagtaatgtccggccacaggaattgacagtttcaagcaatgagttctggaattcattgagatgggtgctgttcaaaaattcggcagcggccaagattccatgtaggggactacggagttcatgcctggtgaaggatagtaattagtaactgcggtcggacatgtcgattatctcctagagactaagaaaacttacgaaatactcccaatgaaatcacctttctggcgatctgcgatgagggattcaatgcggctatattcagccatgatagacgatgaaaacccaagcactgaactgagctcaactgagttggtgaacacctgggtctcaattgtgctccagcagaaacaccctccgaaccactgcgaagaaacagcattccacaaaggcacgaatataatttgcgcggcatgtgggaaatactgattgagtaccgagttttccgcagctttccgtcgctttcgcgtggcctttgagagctgtgtagcactaggtggggaccggctggtggtactggtgccacgaagggccttgtcttcggattcttggtcgtcatcatctgaggtcgagaggagcccatcgcggtgaaaggaccacagctttcctttgggatagcgtcgaagcaacaattgcaggaaagatcggtctaagttggcggcagggcatgtggccattgaccctgcttggggagcaaacggttcttcgtttgttgatgctgacagtacagaggcaggtccgcctgtgtcggaacaatcactacccatttcggtatccatcaaagggctattgttggcttctagaaaaatgaccccaccgtcgctacccaggtcaagactctcgcgaagtaagttggctgctctgcggaaacaccaagagttgccttgtgaatcatctggtggtagtttatttcggctgctgcttgtcagccattctggcagagagctctctactgtacccgactctacttttgaaccgttgtccaatttcgaactgttacccaatttcgaatcggacgagacagagctgaaggaacgcgcgtcggtgctgagtgatcgatcgttcggtggactattggagggcgcttgcgatgcgttttctgaggcatttccacgagagccaccagagccactcattcgattgtaagaagatgccggagttgctgacgaagggccgatactgttggtacgcgacgggtcgatattatccacgaaactagagcttccttcaacgaaatagctgagcccgcgggaaaggcgggcggcccggcgtccttcagaagcctgtctgcaaatcttcaaatagtccatcacaaccatcgataaagatcccagtgtatccttctccagcggtgtcaatccatctcggggttttgtgtccagcacgaaaaaacaacccaaattgatattcttctcggttgtcaagggagttccggcgaaaaagcggaagttggggccgttttcgacgaaggaaaggtgtttgtagcgctcgttttcggccatatcattcacgactagaaattgatagtttgcattctcgcggtcattggggggtaatgaaacagtgtcctgtcgaatggcgtcaaaatcgggaagttataggaattaacaatgcggtagagctcgacaatggctccggggcagccagctcgtagaatgagcaaaacttaccttgcacaaactccatgtcttgcgggtgtcgggtgcccccaaccagacattgtcattgtcgtcgtgaattgtcggatcgttcaaattgagagattttgttgcttcggcaatgatgtgttgcttatcacgatccaatacagttataaacacccgctccacgttcaggcgcaatgccgctagctgcgcaaacgatgtcatggtactattcgaggtacctagaatgagagcttctgtgccaactgcggtcgctggtcggaaagttgcactgctgtgtgaaggtattgagccttcggagatcggtggagtgattgtacttcctgaaagtgaagaaaaagggaatccatcattcaccggaagccaagatggaaccacctcagcttgggaactaggctggtagtaacggtatagctccctcgccctgcgatctgcattgtgtaggccaccatggcgtgctttaggaacagtcatagtttgccgctagcgttagaagactgaggatacagtgctgcatcctcggactccaagtcgagattggatcacgccggtgacaatcgaggcagggtggtgagggtcgagagaagtcgaattgtacaaaggaagtgactaaacaggtaggaaattgttggagggatgagtgtaactatattagtaagagattatctgagaattgggaggaaagtgggatttcttgatttagatacggctccccacaatagaacagtaagtcaggtgaagcgcagataggccagggaagactgggtgaaaaattcggcatgcacagccagggacccatcaatcaaggtacaataaggacgggcattggcaaagtccagtgatcggataaatgtacagaacatgattagtgggaacgagcgatcggtacacattgggagttattgtatggggtacacctgctccaccgtttcgtcgcctctctcttgggactcgtcttggaattgaccggcaacttgagatcgtcgcaccaagatggcgcaactgtcgctggatcagcatattgactggagcacgatggagtagaccggccattgggcagtacggatgtggacaagatgtggacaggagtaggtttcaatggctgtggcgtggtcctgtggcgtgttgaggctgcatatcattggctgacggcctcagatcacatgatttgccagggtattccgatccaagccaagtgggccaatgaatcttcacgatcgttctagtagaagtcgctagttgcaactggttactccttgcttcatgcttccatggcgtagcatgttatgtccacagtctcgatactgtcgaccaaggcttccacatacatgccaatgccatgatctgacacgggctgaaattagcgtcgcaagccctatgacgacagtggcaaattcttgaagcagatttattattcactatgtatctgaggaaagcgatcgtctcttccgtcatgggcctgaacacctaagatgatcaaaggctcacaatcttgtattcgacaacccctccaaacttaatccgcctatgaattatgaccggtcactgcaccccagatatacgccacccacgacccgattgtcaacaaaatcagagcactgaagcaaattatggagacggtccgggtgcgccggcgctgggttaccaagttgcgttctcgaatccgctcgatgatagccgcacccgatgtcaaccgtttgtgccgagtccactgtaacggcgccaagttatcagtcacaaacgagccaacaaggatagctgcaccgacaaccatagcaccggcagcaagaactaggtagacctgcaccactcggcggtatgaatcgtcatctgcgtcctgcaaagctcccgtgatgatccgaattatgatgctcatactattacgatttccaacgtcaatttgtgcctcgaaccactttttttgatgcagggatgttggatcaagcttacgcattattcatggtgaccttcaaagcatacgcggatccaaaaaccgattggtgccacagcgtggtgcgaatgctatcgatgaccgacgttggtccgaaggatacggcaatggcgtagatgccgaacgcggcccctgttcctgcctgcgatgttgcaaaattgatgagaaccatactcaatagcataccaagaccgcaggtaaacactaaattggtcagcgttggacttttatctgatccttgtgatcttggagatataactcacagacggacgcccggttgcctagaacatcaatgaacacgcccaagcagggaacgaggaagaagcctggttaatgtcagctatatccagctataatgagcacgcattccaccaatatcatacctgcgtactgcgaaagagaactataccacccggccttgatggaaccaacattgaatcgtttctcggccagctcggtagcattttggctgaagactgtcgcagcactcgtttgaaacacagagaaagacatgacagcccagaacatccatgggagctcgaacatctttttgaattcaaactttttgttcttctctgtcagttgctccttggtagctccatcgcgtcgtcccttgtaatggcgattacaatactggttgaagaaccagaacgctgcgctggccgcattcgtgaacagattcatgaacaccgaggtccaaaaaacccacgcgaagtttccagttttctataccttgtcagcattttcttaccaagttaatcggaaaagagcaatcacttttgcaatgatgttggccgttgacgtgccaataaacccgcctatcttgccaactgcgagctcaaatcctagagtggatgcaaatccattgctaggggggaaccaagacgagaacatcttatattgagcgatttgtgtggcgatatcgccgagtgcgagaatgactcggccaccgatcatgaagttgaaagagcgcacggtcgcggcggcagcgacgaggatggaaccgatggtatagacgatatttccataaacgatcatctctattcgaaaggacttgtcaggatattcttcgctgatttgacagactcgacaacataccagctccaccgactcggtcggtgaccacaccacttatcaaaagcaggaccgttgccatgaaattctcgctggcttccaaaagcgaaaattgaacattgtctatgttcatttgctgccagacaaaacccgtcagtgaatcgtgcaaatggacgtttccatagcattctgtacctttttgatcgtgctcttcatagcacccgttacgccagaactccaatgcgagccaaagctaatgcacgatatcagcgcgaccgcacacaactttgctgcaagcggcggtggcttctttccatcagagtcatcgcccggttcctccggtacgctgcggatgtcttcacggacaggcgccgacaccacgtcgaccgacttcgagtccgaagtatcgactcccattatcacaactcgatgctggaattatatagcaagcttctagcttgggttgtcaagggaaataaagtactttcacgcaaacttaaaaaaagacattcatgccattatgtactccgtactatttaaggatatctgagactggcaaatgttcaagacaaagcggagccctgccagtccgtgctacagcctacggtgagctgatattggtgcagatcagctcgaacgtacgtaaaagggcaaagaagaacgtcccctaggcgcttggcacatcagataagatggttgagatcggggccttgtcccgaaaagagcctagcgctgcgcatatactccagttcggagcaacgtcggtgaatttaacatttttttaagtctcttcaacggctttaggaaagccctgcgcatgcccgcagtgggaccctggggtgcaaggcttttctcggcttctccgggctgtcgtcagcttgcaaatgccgttatattttgctcaagtttagacccgcttggaatctttaaacgggttacgctgggcagattcagattattatttcgtgcgctctcaccagatctgtctgtcttcgtcgggtctcttgaactgtccgaggtacaatatacgagggtgatgcgagctggtctcgtcatcacctttgtcgactgctataatttgcgtaaagactgagatattggaaatttcaattgaacagcctccagatgtggcatatcaataggcttctaaaacaaccccggcagtgggcctctagtctagagatgtatgcagtcatagagaaaaagaaaagaatccaatacaaaattccacaaatattcaacgagaaaatcaaaaccgttccatgagccgcttgcgcacagtccacatgcgagctcgtttgccgtagatgtacataggaatggacatgagcatgaagaaaagctggataccaccaatagacaggaacacagtgcgtgaaccatcggaatcgagccaatccacgataaaaagggagaaaataaggccgtggagaacatctgcaagagaaaaaagtgttagaccagacagacctaacaaaaaatgaaggatagttcaacatactcttgctaaagttaagtgtcactagcgcctcgccggcatactggcgatagctatctacacaaaaagtaatagcggtcgtgctgcctagacagcaaccaaacgagatcaaaccaaagaagatagtcgggacaatccaagagtcaccgatctcagcactccacccaaaagccatcaggccgatgacagtagacaacgcgataggaattgtcatgacaagacggaattcaggctcgtagatgcccccattgcgcctggtcatgaaccgggcgataatgtcggatactttgcccgccactccagttccaaggagaccgccgataaacggcgatatgtagatcaggcctgtctgcaacggggtgaagttgtattgatctttgctctcgaatatgtgtgcaactgactccgaaagtacgatcagccacccgaccgatagtgagtataccactgttgaccacagcacggctggataggcgaataggatgaatggtcgcgcggcaactcggtaccagctgtcgtgagcgattcgtccattccagactctaagtaatcgggagtagggaatcttcggaccttcacgcaatcggtttgtgtattgtagggttgcaggcagcggtggcccggtaggctctagtgactcggtcctcgaaggtgatgcggcacctcgacctacggtgactggtcgagctgcctctaggtcagctgtctccagatcatctgggtgtgcgccaggcaaaagggcgtgaggtggtggttggaggaagtcatcgcctttctcattagccggggtcggcggttgaatgttgatttggtcaccattggtagcattaccggcctcgcaaacagaatcggacttttcagtctcgactgcctggcctccgtcttctaggtggtcatccgcgaatccaaaatgcgcatgtttggacttcttcggtgccaatgctggatctgaatggtcctgttcggcggactcgtcctggggttggacatacgggtgccgccctcggaagccgtgggaaacgaggtcggagacactctgaccaaggccacgcgagcccttgtgtttgtgcacacgcgggcggggtgtacgatcccaaaatgtttcgggcacgaagaaaaagagcaagactaaacacatgcctgcaaccatggcgacaatccaaaatacccagcgccagcttaggctttcgatgatggcggcactcacgagggggatcaggttctttccgcctagtagcaagagcgtgtatatccccactcgataggctctttcgtgtaagaagtagatctctgcaattgtggcagatgggagacactcaactgggctcacggcaaatccttggaaaacacgagcaaccacgagacttgcatagttcggtgacgctgcgcaccaaattgccgagatcacaaacaggatggctcccaggaggtaaaccggtcgtttcccgtatagaatagccgtgggcgacatcacaacagaccccagacccagccctaacatatacagcccggtggtgaaagcaaccttctgtgtactggtatcgtacgtggctgcaacctcgttgaacccagccgccaagataggggtcatgccgcctcccatcaggcaatagaagcccagcgagaccaacgcggtatctctttgccatacaggccagttcaaagggtcatttgcagagtcatctggttggggatcaagcacaaattgtccgtccgctgttttcttctgggttggaaccgtcgaccgcgttcgagaattagaccgcgagggcggataagacgaggctatagaagatgtcgatgtccggtgcggttgatgcctcattcccaagggttcattgcgatttgaggataagagaagtaccgttcctaaatcatgccagccagttgtcagacccgttccacaatatcatctctctgtgacaggactccctactcaccaggaacttcgtctgtctctcgatcacttaggattcccagtgttgatttggcgcgataagtctgattctcgctacgctcgaaatcttctttggtctttcctccaaagagtcgtctccagcgcgaagcagctggctgctgctggacggggtccaccgccgtgttctcctccattgtagaagaacggtcttctgtcggtgaggccatattctgttcgagaactaggaataaggattcgagatagtccctacaaaaatatgtgaagtatgtcgccgagtcttgcgaaagcgatcaacgcttctggatcaacgcaagaggcagtaaatgaacatcactcaaaggcatagtttgatggagtgagaaagacgaggggcgaggtagtagggaaagaaaaatctataagtggcggggggtgatatatagtgtcctagggccattcgggctccatgcgataagctaaaatggtggaaacacaaaaagaagacaagcgacgatcccaaagaggcagtggggggaggcggtgagagcgtctgaaggtactcgctgagtaccgtgactgtcgcccagccgccaaggttaaatcaagtcgccttgaggtactatcattttgatcttatcagagatcttcttgcatatctgcattctacacatccctgtccgtggacagaactgctggaattgtccgagaatgacggggcagataagcacaccattttcggacaaggctaagctccccacaatatgtcgttgataatgcacctcgtgggtcaacaatccgcgttgacaggtggatctttgggctacgcattgcacgagataacgtcgagaaaacaatacgctacactcacatatctgtcgacaatctactccatacagcgagggttaattgcactaggctcgaatattcccaatcgccgaatgcgcccggccattcctggtatatgccaagccactcaaatccggcgcttgtcgcgagagttttacttcgcgtgatctgcctatccataaacatatctttcgacgagttcaagtgtcactcactcaaatcatgttttcaataccccaaaattgtctcagctgaccgccgggagatgttggctgtcgtcattgtgcaggccaattgcgggggaaaggagccccagctttgatgaacttgtcataccgttggatgtcagtgtctctgttcgtcggtgctcgagctagcatggcgtcatgggtcagaccatgggcaaccttgtactacatcatgtttggaagaggaagatacaacacgccagttgcgtcaacggttattactacttctagggatgccacctgatgtgagtccacgaaggatcggctgggatcgacagattcgttttagggtgctttgattattgattgccatttgctatatgctgtgggtggattaagcaacttgctaatataagacaagactttctagttatcatttgatggcattgtccgcccctccatctgaagtaggaggaatctggcaaatccccgggaagtacatactccagtcccttgtcttctctgctgtggcattctcatcaagcttgggatttgctagtaataagggaaagagacggcgtatgaggttgtaccaacgtgatggcatggttctctctgacagaaacccttgttttccatccctaaaaatttctcttgtctaacctatttcaggcatttacacataggctttttcaccttaaggcctgcaacggctagtatagtcctttgacttgatactatgttgctgttctagggttcctatacaggtgtgtaggggaaaatggctaatattacgaccatagcatactacataaatacatagcagaccattaagagtacagttctccattcagaccatgcccatctacgttgatggccaactgcgtccaggggtgaatcaaatcccgccgatttccattacaggggccgtttgcgggcagtcacgtgtgaaaccccctttgacaattctagaccaggttcaacacaagtgctctttctttgctttgaattcttttgtcatttgcttatagttacttcatcttaatatttctacttctttcttactactccacattcatttcgatatccatctttgcccttgaaaaattgtccggtgtcgatcaaaccgtcccacgcgacttagtgtcgtgtcatcactcgaagaattctctcaccttggatatcggttcctccgctttattacggactataaattcaaagcgcaatctcaattcttattcgctcgttctgtgggagaaaccgccaacatcatgaagatcaaccagtcgcccttccttctcttccttcttcctgccatttcggccgtgctcgccgacacatacaatgacaacatagactctaaagtctcgcgggagactgtgggtaacaatgctcgtctcgttgactcggatatagtcgcatccaatgtcgccaaaggggcgccggacgtccccgtggatggcaaggatggcagaccacacgctggtccgtgggtggaaaccaatgcagaccgggatcgcacaggtctccagggaggcgatgatgttgatccggtttctgtcaaatatgataccaatattccctcttcggaacacctgagcaccgaagaagggaaaatgatcccgcattcaaacggcggcgtgatggatgatccgcatcgggcgggcccgaaagaagggacacgaggaaccgagggtggtgtgtctgagaaaggaaaagaaagccaattggcatctgaaaaagtcccgggagggccgaaggaagcgcctccgttgccgcatagtgagaccaagaagttgggccccgacagcgacgacacaacaaccgggggtggaagtcggtctgcggagggtccgggaagccttggaatgctcggggtaagtctttctttatgttgcttgagtccgaggtccttcgttgagcaagtgggattaatgtccatctagaaacccgacgacctgcctgaaaagccacacgatattccacaccccaagtccccgggcacagcaaaggaggaccctataggccttggacacgacaaagtcaccccggggtcgtcttcgagttcttcctcgtcctcgtcctcgtcctcgttgggccacggccacggccacgatcacgatcacgaccacgactctggtatccatgatgccggcagctcactacactcccttgtcttctcattcaccatgattctcgtctctgaaatcggcgacaagactttcctcgtggctgcgctgatggcgatgagacatcctcgcttggtggtgttcagtgccgcattcagtgccttggttatgatgactgttctttcagcagtcctgggccatgcagttcctactcttatccccaaaacgttcaccaaattcctggctgccattttgttcttaatctttggtgcgaaaatgctcaaggaaggccgtgaaatgtctccagatgaaggtgtgggtgaagagatgcgagaagttgaggcggagctcgaagagaaggagcacgagcagctgcgtatgaaccgccgtcgttcctcggttactcctcacaatctcgaagccggtcgcgctggaggccgtcccaaaacccgtggctccggaaaccgcctgccttcgcctccggagagcttgtcctcgtcctcgtcccgtggctcttctccccagccccgacaacggctaaacaatgtcgtttccggattaagcaatctattttccctacttctcagccccgcgtgggttcagacctttgtcatgaccttcctcggcgaatggggcgaccgcagtcagattgccactatcaccatggcagctggccaggactactggtgggtgacaattggagctagcgctggtcatggaatctgcaccgcagccgccgtactcggtggacgggccatcgctggccgggtcagcatgcgtgttggtatgtatcctctgcttgttttcctatatatgacacatgctaatcttgacattcatagtgactctgggcggcgctgtggcattccttctgtttggcgtcatctacttcatcgaagccatcttttgaagcgctgcatatccgcggttgtatgtgtccatggaaacttatcgttatagtttttggcggctgattttgtctaaaattcgaatgaatgtatcttgtgacatacctacgactgttttaatactataattacgtgtctggcccacgcaatatccaggttcacaatctcacatcaaaatggaaatccaagctctgagtactttgaccgtctgttgatgcatcaacgtgtcgttttctaccaatcacatagagacacggggcatgcgattacatgaggaaatgcacgagcctacacatgtggtcgagaaagtgttgtgatggccgatctcttcggtcttaggagtaattctcctacaaatgaacattcgtagttccaccacccgctatactttgaacgtgagtatccattctaaggcgttctaataaacctagatatgacgtaaattaggcgcccagtgtatgagactagagatcagcgaatataaaatacgaggtagatatcattcctaatttaacctttgaatcttcccgttcaaggtctagcgaactcttcaacatgtcatggtccaaagtgaacgaacaacgatgtgaacgtctacttggcgaaaatgaaacatttatcaagatcgttggtgatgccgctcgtccgttcaatcgtgaacactgggctatcaacatcattgtctcggtgaccccgctaggctcactcgccaaggaaaatcaatcctccgtcttccgcgaggcatggagggctctgcgtttcaggcaccccacgatcgccgcatatatcgtggacgaaaccaaatatgtctacgatatccccgaccttacggcacttgagaaatggacggcagaaaccttccaggtgattgaggacaagacggttgatgaagtcatcgcatctgccacgcgtgttccatatgctactatgaccttttttccccagacgggtgagctattgggccgctcgcaacactggagaacggatggcatcggtggcttgattctgatggacgacttccttgacctagccgcgcagtctgctgcagatacttcctccctgccatggggtgaagagaccgaccggttagcgtcgtgtgttgaggaggcatcgtccagtttcataacgtcggagaagcaagataggcaactaggccagcagtgtgttgcaagttttggtcatgccgctggggccatcggaatcgcctcgcgcgcaccagccgagacttccccaggtggtacgcgcattagccgtcttcatctcaccgagcaagagacaaaggccgtagtgcaaggttgcaaggctcgggggctctcggtaacagcagcagtacacgcatcaattgccggagccaactatgcactagccactgctgaggatcagaacaaacactatacgagtacgatacggtacagtttacgtccgttcctaccagggccatactctggtcgccagtatgccagcacaatcctcacgacgggttggatgttccctgtttcgtccgagtcgtcatggtcagaccgagcaagggcataccatggcgaataccgcaaaggtctgagtcatgcatacatttcggcgcatcgcgaatacgccattgggctatgcaaccttcttcgcagcttgccgaaggacatcccttcgccgaccgatgtggatatcagcagcctcggtgtgtgcgagaggtttgtgacgagagaaaagggaactgcagagcggggaattcgcatcgatcgagtctcgggcggcttagatatgatcaatagacaatgcgtgtgtcatgtgtggacttttcgagaccagctttgtttgaacttggtatacaatgaggcattttacgatagggcggagggggattcctttttgcagactgttaaaaactccctgctgcatgaattgatactatagggtcctaaagttttataactcgaatgtatttgacccatgatcacatgatttcgtcgaaaattcaggtctcacgccaagcttttacgtaaaaataaagagggggtttagggtttttagtgcttagggggtttttagggtcttgacctgataatacaggcatcaaattacttaatacggactagcgtgtctcgctttataaataatccgttgttccgagtaacgcagccccgaaaaccctgacatctggccactccgctcccttaattctccaactctttcatcaaattcgtacacatctcatcaggcgaccatcagaagtctttcggtttcatccgaatattttttttttttccagttatatcaattttcaagcaaatcgcgcgaaagtgaataaataacaacaaggcttgtaggggcttgactcctgccctacattgcccaccgccttccatggcacgcatcacggggtcccgcatgacgcgaagtcggagccgagaagcaaatgcagcgtttatgccaaataaggggtcgttggagcgcaattgtaggtaattttccggttgttttttggtgtagcctcagcagcccttgaggcggatcaggcaactacgcattaagggaacatatgcatagttgtatattcctcaatgcgcgaactctctccataatcctttcatctgctcgtcccgttgcctcacctttcatcttgttgcctccatcacttctgtttgacagttgaatgtgttctgactttattcagggttaagcgggctggctgaggagccttctgctcctcctatcgggtttattgcacccagagatgtggtaccagaatcgcctgaaaaccaagaaggtaataccaatgtgtctggtacaaccttgtgtcccaatgatgcggagcccgccgattctcgagtcaccgatgctcgagtcgccgataaaatcgcgactcacttgccgttcgttcaacagcaggcgacccttgtcatgagcctgttggttcacccagacttcaacccggacagccttgcagccgagtcgaaaaagctcctcgattctggccacccaaatcgcaaacgattgaggcgattcgtggaagggctgatcgatgaactggaagactgtcctctttctcgtgatggcaagtccctattggacgtctcccaggcttgtcgtttgctttctcctgcgcaactagatgcatcaatcacatatatttacatgacaaattgcgctctgttgaccctcaacatgttcctccccagcattggcaccgaatcccagtcggaggttatccaacagctggactcccagtttcctgcatgtgtcttgggcaaccttccggacagttctacgccaaaggaacttggggcgagtgatactagcgaggctactttcaatcttgccttgagtatccgcacacagttcttcatcatggagttagaaagacgccaagatgagcaagacttcagcccactttccatcttgagacaggtctttgcaatagacctcattcccagcgaagattactcccaggatatccccggttccttccgggggttcaacttgccgggtgtcttccaggacgaggatggccatctccctgaaaatcttcctgagaagtttctcatcgccgtcaacgacagattcaatgaacttcacgaggagctttctgagtgggactccgttgatattggtggtctgaaaaaggcatatagatggcggtcgtttgaacgagaccttgcccgttggatctacgttcgtgacagcgaaattaaggaagacatcagacgcttgtcagaaagagtgcatagctcatccacacctcgtcgccttacttctgtcccggtcggaactcccaatcgacgagtatcgacagtgcctccgtctcctcagaaagaccgactggtgagcatggcaccggatgcaggtagagtgcccccgtctcctcagaaagaacgactggtgagcatggcaccggatgcagccagagtgccccaggcagagacgacaacgcaggcaggacagacagtaccggtggataaattgcctgaaaacaacgctcctcggccaagtgccgcttctcaaaatgttcctgaaaaaagtgtctccgaccaagtcgcacggccggcagcaaaagatccaggacggcgcaagtccaaaaggtatgctcactctactccctctctctgtggctactaactttcgtctatagcaactaccgagacccggcctcgttcgcggcactcatgagacgccaggctactagtcatcagcaacctgtctcgaacgaatcgcaagcgcaaaccatttctacaaagacaagcattgtggcccacgtgattaatcctggccttactgctagtcgcgcaaccgaggcttttgaaattcaacaatcccctgagctgggatatacagacatcggggatgactctacatacgtaaacaatgacgaggacttggatctcggccatggcccgggaccagatgttataatatcaaccagtcccccaaactccgctcgaatcagtcatgtcagccacaatcccactcctcggttatctgattctcccagagatggaaacccacagcgatcagtcccgatcgctcggcgcttcctcgataagcagaataatgctagggttgtgtcgccgatcagccaatatgatactcaaagtactgtgttggggaagcgaaatcggaatgccgatgtcctagatgatgactcaactgacgggtcagacgatgagttcgagcaatataaacacaacgtcgatccgaggcgcagggtcgaaaagtctccacacaacgaacctgccgcgaagcgacaccacccccaggacaccgcgtggtctggtggagagcagtcgcaatcaagtatcaatagattgttccaccacaaccagtctagccagacgcaagtttctcgaaggatccaggcggttgaaagtgacgatgccgccactgatgaagagaccaccgttgcacagctcgaaccgccccctagtacccagggtcgctgggcagcctcccaggctgcgatggccaggaggagagttccgaagaccagccacaggtggacagatgaggaggatgaacgtttgcttcacctcatgtcaatttacggcactgcctttgctactataaagaagcaagacaacgcttgccccccagctgaaggcggtcccgtgcttgaacgtcgttctcaggtcaattgtaaagatcgtgctcgcaatttgaagagaaaatatctcaggtaagatatcataccttttcgtccttagtgtgatgtgtgcggcagttctaacccgttgttttacagagagggtcgaacacttccaccgaacttggataaggcagcaggttgatttgacgcattgataattacaagcagtcgtgtttgctcttgcgtttcttagcgttcatcgagatacccaatgagcatatgggatggcgtttttgagcgttcatttctaggctcctgctttcgttgttgcttttcgtatatgtttttttttttgccttgtatagggctcttctacgaagaaatgttgttaattgttgaagatttgtttactattgttttatcttctagattttcagtactgccaagattgaacgagttgttcttttacatacttatcgccacaaggaccatcttttttaatatctcttgttaatcacacaagatacgctctctaaatcaaaagacgtgcaatgaagtcaaagcaatactttcagccacttggcattgtccatgtgttcgttcctcttaggtatcctttctagcagatttggcaaccttctcaagatcctttcaatgcttttgctcgtttgcagaatgaccatccacaaggaaaagaaacgagaatggagccaggggaagtgttttacactgctgagacagagacaaaatccgagatcagatagaatctgtactgaaaggatacactgactcaaagtcaaggccagaatacaagagttcaattgctttgtatggaatgtatgaggaatcaacacgaagctaagagattatgacatattgcctgcctctgcctgttctgccaattgctttgttgagaaactttcacgtctttgatatatgacattgatagctgtcatagtgtctcaccaccaaagaacgttattcattttacgagtttcggcgtgcatcagctagataaagaaataaagattccatacagaatactctaacatgatgctacgtctacggataactcctatacagtacatagcagatgagacatgacctttgtataaaaacagatgtatttcctaagtctaactccccatatcaattcaacaccaccagaaaccgactacttgcatcaaaccagacattcaagaaacttgttcgcacgttattacattccacctctcaaaatgggcaacgacagaggcagaaacaagggcagaggtaggggcaagaaaagaagtcacattcacagtctgaaggagaacactgtcgccacgacggtcgcaacgaagctcgacaacaagcctaagggcaagatctcggacaagcatcactgtctcagcaagcgaccggagcatgttcggacttcacgatgccttcgtttgggccatgtggtccagtgtccgattcattctgacagcttcccactacggttgagcgagtgtgtgaagtgcaacagtgctgacaggcgacaagtgcaacaggagcgcaaagatagaaagaagtagatttttggtcctttaggttagatagaaatttcgaatccgatcaaaatcttgatgcaaacttcattcattgtacatccaatcccgccaccatctgagcacattcatctatcaaacgtgcaatgccctcggtagccgcagcgctccgtggaatattatgtcctccctcgtgttgatatgtcaatcttttcgtagactcagacaaataagctaattgcagtgaagcgggcaaccgaggatcaactcgcccataaacgtggagcgttgggatttttatccgcagctgctcgggcatctggacagtatccagtccaaatatatccgaggggtcaactggggccgccggattcaaatggaggtcagtatcaccatttcccccgggagtggtccatctgtctcttccccatttcaggatcgcttccttggatgctcgttcgcgcagagctagcttggtccgtttatcccactcgcgagcttcgtcagaaatggtcattcccagcgtttctaacaccgacaagaccggtccgccgcaaataaatacgacggctttgaaaggcaatggctcggtcggcttctctatctggtggaaccaaatataactggcaatcaggaggcaccctcgagaaaagcataccattccgtcgtatgggacattgttgtgttgggtaaggtatttatgaaaatcttgacaggcagcccgaatatcagacacagttgcctttagccaccatgtgtagtaggggccgtctgggtagcggagatccaggccggcggctggtttggacgtgaaagggccgtcgatgaaatgaaacgcatgctttgatggcggcaagtgggcggtgacagccgctacagatcgactgttaggttatttttgcttgcaggtttttatagtcagaaaaagcgtacccagctggtcctggaagatggtagcagaggaccctgtgccgtggatgcatagccatttcatattgtgtatttttcaagagtcaagacaggccgaggtaaactgtagtcaggtcaaggctaggcatcagttagaaaagtatatcgaaatctcgtatagaggtgggaccatgttgatctgcgctgatgatactcccaggttcgttacgcttctctttgggctttaaatgtgtcggctctgaagaaaaactctaaaattccaaagtcctaaatttctaggctgtggaccaagaagcatcaacggcaacataaacataccccggtatacagataggttggtgtcaaagagaagtaattggccatggcgaacacgtacgaaggctattagatttctaagaatgttgatttaatcttttctagcctttcccaccgatctgggaaccggatccacaggaaatacctgctggcctctccgaaaaccttcgtcaaaaatcaagttagagcgattccacagtggctctggcatgatccatgagttttggggatcgcgaagccacaaacgtagcaggtgacgacttgggatgttttcaattagccaattttcatgtgtacacgaccaatgcctgcttaccgattttccgaatcatctatatagctgtttcgagcatgtatcatgcttaggttattgatgaattgcatatcgcctctctccagcttcatggctacatgaaacttttctgcaagaaagtggagagcatctagtgcctccacctggatagagcttagcatattcatctgggatcgagcaccaaatccagaaaacgagcgtcgagagaactgcaagatgactcgttccggagctccatcgcaagctggttggtagaacaaaagcggccggtgagtgatcagaccgggctgttttgcactaattagggttcaatggcacgtcagcaaattgggtctttttactggagcatcggattatcatcgacacggtttgcacacctgggtatcggccagtcctccgccaatacgcggagtaggtcggggcgggtctccgccagagaattgtagacagtccacgcactcgcgagaagactttcaccgccatttacgggcccacttaggacgaagagggagacgatatcccccacatccgtgtgatataccacttcgccatctgaatatgctgccagggaaaagttttgtgcctcgttggggcgtcgcatgtcggttatgtgggccaacatgacatctgccggctgcccctcaaattgatggtcttgccgaccgcggatggcggcaatgtgcgaagaaatcccgacatagatgatcatattctcttggcgagaatagcgttctactggaattcctcgaataagtgtaaacccatagcctgagtgcagattgtctgatgcggaccgcaggatcgagtgcaaattcggtagaggaaacgtcgacgggtccagagtctccattggctgattcagttctgcagagttatcagtcttgagcgaggaatacgagagtggctggctgactttggaaatgcttgagtgctgcatctatctcgaccagctgcggagcttgtaaaatcaacaggtacggactctcagagcctgcagcgtgattcatcgagatatttcctccttcccaggccatatctgcggtcaatctctggggaaatccatgaggaaggattttttccactggtccttcctgtgcatagcggaacatacgagtgtcgtactcgttgcgatctggtaaataagggagttggtcgaatgattgtgccatggtcgccttgagatggagtattacagttggaggcacaaaatattgagggcatgaacagagtgaatgctttataattacatgggatgtctcaggatccatctctctccgaaatattttacagttttgatcctgaagggacgtatctcgaatgtgcggccgtatactccgcagtcccgcaccaactcttcgacatcacctaatgataatccgtaaattattgtagttcggtgaatgtgacctatcgagagtaaatacacgggtatgtgatgatctacataaactgcaagataattggcaattcagtcccgagctcagctctgggatttcaaatggatcagacagaagcagccaattgcgaagcttcaaatgaaaattactattgtggaaatgcctaccgaggctatttgggattatttaagaaagacaaaacatgaataagtagttaatacttgggaacatattcattttatcgtctgaagttcctaacaatcaccagaaaacatgaccatcctctccaggcacgatcgagcattattcgaaacaacgaaacgtgttcttgctgagattgtgaacgaaggactagtttatgcaaagctagagtccactgcgaccggagagccacagatactgtgcctacagagtatactcaacccccaggatggaaccttggtcaaggtgccgatcaaagctggcgctgtcatcgagacaaaagatgatctcgtggtgtctgttgtacgaccagacagcttacagccacctgtgattattgcggataccaggaacggagagttggacccaggtacactattcaagttcctgagtacttcgttcagtgacgtcgctagtgagagagtagtggatgagatcgttcaggaattgcgcaattcagcggccaatcaaggtgagatagcattgatgtcacactgtcttcattgtactaaaaatatccagagaaatggctagagattagcgaatcccagccattgttgagcctcaaggatagatctgctagctgggagcggacattgatctatggccacccgagtcatcccgtaggatcccttgataccgaacctgctggacaaaattctgactttgacattgacagtaccatcgattgcgttttgctcaagcgccgctgaagcccgtcaccgccgcggatatccctgagatgctcaacccaactctggcatttgtttctgttccacgtgccaatcttcgtgtgacaggccacttcgagcaagagttgcaaccactcctggaaaagcttgaaattccaaaaacaaccggtgaccgagtggttgtcccttgtctcgctcagcaattaccctctattcaccagaggttcccggataccatcgttctaaagcttatcgcggactgtgccgatgcgcaggcatcaatgcgtactctcaccatacgaccagagttggagttcaagtatcacttgaagctctcactggcttgccagataacctccgccctgcgaactatcactccgtggacaacttgtggcggcccggtccaaacagagatcttggaaaatttacttccaaaggacctctgggttttccgagaggtagcagctgtatcaggcagccaggaagatttcaacgaggcgcgccacctttcttgtattttgcgagatagcctggagaccagagctagggaaaatgatgaaactcttatcattgccgcagcattggcccagaagcctagtggagatagtcgtacatatgcggagattttgtacagcttggaaacaatctcccagaaacgggaatggttccgaaggtaagtgcaacgatcagccacaaatatcataacagatgctgattcccgtaccaacagatacgttacggtcctatttgagcttgtgcttcccccattggtccagtatggaatcggactagaaggccatgggcagaatcttgtggcccgtgtttgccgtcggacaggtcaaatcaaaggatttgccgtgcgcgatttcggaggagtaagaatgcatgtcccgacgttgcgaaaccatggcgtgagatatgattcgctgccccccggagcagccaccttgacggatgacttgcagaatgtgtggagcaaggtagaccattcacttcttcagaaccacgtcgggctcctgcttgagtcattgggattagagaaccatggaggatggacaattacccacgaggtcctatcgacagtcttggggtcggataaaggctctcccgggtataccttgttcgaatacttcaccaaggacacaatgcccttcaaatgcttcctgagaatgagaatggagggtaaataccgtgatgtgagtcttccgatgtggtctgttgctcaaactattacgaatctctgacgtttttcccgcagtacattgagagggaggttcctaatttgcttcatgtcacttagcaagttcaaggtggatggaagagaacgcaacgcgagtatatatcactgggtgaattgggaggttgatttggtcaatacatgtatttctttcgaaataataccccgcaggaccgcccctcttcctttctctttctcttttcttacaattccccgacttctacaccttgaacatacagcgaataccttcgctgtgctctcgtaaacctgatgtggaagaatacaaaaccgacgcatattgccttccaagcacacaatcgacatgtcctgacctgtttacaattcgacgccgacaagattatagtcggtagtgacaacgccaaaatcagcgtgtatgataccaagaccggagcgcttcgagcaacactggaaggccacgagggtggtatatggggactcgaataccatggcaatactctggtctctgtgtcgactgaccgatccgtccgagtatgggacattgcaaaagccaagtgcacccacgtgttcaaaggtcacacatccacagtacggaccgtacagttattgctccccgttcaaattggccagcatccagacggtacgccagtgatgatgcctgaacaacctctaataatttcggggtcccgtgattcaaccatgcgggtttggaaactccctcaacctggcgacgaggagtatttccctcccgctcaaagtgacgaggagtgtccgtatctcattcatgtattggctggccatcaacactccgtgcgagcaactgcagcccatggggataccctggttagcggtagctatgacagtaccgtacgagtttggaaagtatccaccggagaatcactgcaccggctagaaggtcatcgatacaaggtttataatgtatctttggaccatgagaggaaccgctgtattagtggatcaatggacaacatggtcaagatatggtctcttgatacaggtgcgttgttacataatcttgaaggccactcatcgttagtgggcttgcttgatttgaaagatgatctgctcgtgtcggcagctgcggacagtatgcttaaagtctggaaccctgcgaatggccattgccagcacacgctgagtggccatacttcagcggtcacaagcttccagcacgatggtcaaaaagtaatctctggttccgatggggaagtgaagttgtgggatatacagactggtgtgtttgaaagggatcttctcaccaaccttagcggtgtctggcaagtccagtttgatgcccagcgttgcgttgcagcagttcaacgtgggaatctgagctatatcgaggtaagtactcatctaaactgatgtgttgtcataatttgctgatttatgaagattctcgactttggcgcttcccctgactccataccaactggtcggctgggggagcggatactagtcgatgagctaggtcatgagatcgaaagccggaagagacaaaggcagaaataatctagtgtttgattagagtttaaccacaacgtcctcaaatatttgtactatcttcgatattactttcttaaaaatgccattggcaaaaacgtaaattctccgaaaaggatatcggagtccatccgggagtaaataatgaatgctaatatagtctgctcatgcaaccccaaattaaaaacgagtgtggaatgcctatcccaagacaggcagtaaatgcaacacaaatccgaccagcagatctaacacaaggaacagaaacggtatatcatccctaatatcacaaacgccctgttgacgaaccagcgacggtataactgtacatgcaatgtagagtacagggaatcaaaatgacagtatatgcagcttctatctcaagacctgaaggttaggagcttcacagaagcaagcccatacccacaaaaacagcgccaagcagtgaggatcccgcgcagactgttccagctgcgttgtttgtgggcgtgggcgtggcagttgcggaggcgaagacagcggacttcgataaaacgttgccactcttagagttggcagtcgataccgcggtcacgatgccggttggtgggttggctgttgaggcagcgacaataattccgccagctgcggtggcagcagtgggtgcaatagtagtggaggcattttcagatgcagagggttggagattctcagccgcctggatgaggttaaaggtatccgcgccgccacctagataagtatgctgtcagtcatgatcttgtttccatatggaatattataggtgactcacagcttcctgcaggccatccagcgcagggcacatcacatttactgtcggcgatcttagccgaatctgggggcatttcgttgccgcagtagcacatgttgccacggctcagagcagcgaccttgtaattgtcctctgcgcattgggcctggcaatgtcctggtgattggtaggtgtaggggccctggttcttgaatgattcgatagcagagtagcagcccatactggcggtggagctaagcgagtatacgggaagagctagggcaagcgcggacaaaatgtagttggaatgcatgattggtaggcgaggtattcgatcaacgaattaaagagtgaatagttgttttgagaaatgaaggaaagtatacgcaaaagagagagttgtttcaggtgccagggaggaaaaaaagggtcccatcaagcatctttaaggcggccgtttgtttgacacccgtcggttccatttttacgagtgtttttctgtggagtaaggctgggactgacgacatcgatgtccaatcgatcgactaaaagaggcaaaggattattctgaaacactaagcgacatgttctattgaacccgcaatggggctacatagggttcattggcttgcgagcggacgatcgccgatcggcatccccaggtgtggcgtctcgtttcccttttgagcgaccaatgacggcggacggctactcctgagtcaaaaagcatgaacttgagaaggagttcgcgtgtttctggtttggcgcttgccttgatcgagcataggtagagtgggtttagggtgttgcatttgtgaggaatctggcattgctggtcatcgctggtcatcgccggtgaccccttgtttctccttttctcctttctgttagtattctggtatcctgggtattccaaatactcttcatcttctgcaagatatcaggacagtcattgatgtgtatggcatagtctaattgggaaactggacatcgaaattgagtatcaaaatgaatttggatccatggttaacccgaaccttccgcactgttggatgccttgtatatcaggcaccttaccttatctaagacatctcaattcgacctggcggcccaatattcgggcaccctttttgacccagggatccggaacctccacagggggaggcaataatgatcattgggttattttactcgttcggattgcgatatttgtacgttgtacccgctggaatcttcccgtcaaatgccggtgagctgagctgtatatattgtccacgggtactccgtccgtactccgtattccgcatacctatcaatgcctatatcaatagtcgacggttcggattgaaatacgagctaataaactaagtaaggctaggtgcagggatctgccaataattccagttgataatgaaatccgacaggaaacatctccatcgcatagcgattaagcttcgcggtacatcaactgacattgtacgataccgttgacaattattcatggctgagacattaaggctttctttatcttagctgaacactagctccgatctattacacggacacgaaaccttgagctgggctgagacatttcctactttcaatacacttgaacatggaaaaccaaagttgaactgccaatcccaaaatgatcaacatgtaactatacagcacacttaccccaactctcggcaaaacagctaccctaatagggcaattcacatcggctatggccgccagccgacctcgggagaggggaagatagcaagaagataagataggccttgacgtgcttttgacatgctctttctgggctattgtgaatcccttcacgtcaatttcgaagacttataaatattttgattcggaagtattgaatcaacttagtccgaccatgaaaaccctcgctctcctcggcctggccgcagtgccatcgctagctctcaatatccccacacagcagcatctcttctccgacaacgatctgtcgggtcattataacctgctatcaagcccatctacacgggaaacctgtccccagccgcccaaggtcagcctccccgatgatggcctgcactcgtcgcagatcttcctcaccgatgatgctttccgtgctcgccaggcaaagcggctctcgcgcgcggtgcagatcccaaccactgtgggtgattatatggaagacccatacgatgaggcattcgagcctgtagtcaagttccaagcgctgctggaggagctgttccctctagtgtaagaaattgaccaattgtgacccgccatgaatgagaactaaacaaatcacagacacggccgcggcaaggttgagcacattaaccggctcggtctagtcttcacctttgaaggtgctgacacttcacgcaagccgctactcttcatggcccaccaggacgtcgtcccaatcgacgacccatcagactggactcacccgcccttcgaaggtgtctttgatggcgaatggatctggggccgcggctcaagcgactgcaaaaacgtccttatcgggttattgtctgtagtcgaagacctgctctcccaggactggaaaccaaagcgcacggtgctgtttgcctttgggtatgacgaggaatcacacggcttcctaggtgccggggcaatctccgcagctctggagaaaaagtacggcaaagactctttcgaatttatccttgacgagggtggaatgggactgcagagcctgggcgatgagtccgacgccaacggcgagatcttgtatgctctgcctgctgtcggtgagaagggcagtctcgacctcattatcaacattgccgtgcctggcggccacagttcgatcccgcccgcgcacaccggcatcggcatcatggcggagattctgtacgagctcgagcgaaaggagctgttccccgcctggctggataccgaccacccggcctacgggatgctggagtgccaagcacgatactcacccgaccacgttgagccctggctatccgagaaactggcagcacatgatcctgccgctcttggcgaagctgttgccagctcccgcggtcccgtagtccggtacacaatgcagacatcgcaggccgcagacctgatccacggcggtgtcaagacaaacgcgctgccggagaagatctctgcggttgtcaactaccgcgtggcattacaccagacgcccgatgagctgcgtgagcgcgctatccgacttatcagtcctatcgccaaatctcacaaccttactctacatgttgccttccccggtgtggcggagtccacagaaggagatgcgagcgaccgtactctcaagctgtcccctctgagtgttcctctttccccggctccgatctccccaacagatccgctcacatcgaaggtgtgggcgcactttgccggagtggctcgtagtgtttttgagtcgcacccgaacccacttgccaaaactgcgtctggttctaagccgacggttgttgtttcaggagatgtcatgactgggaatactgacacgcgcttctactggtctttgtcggagaatatctaccgctggagtccgtcgcgggctggcggagcgctgaatattcatactgtggatgagcggattcgcttggatgtgcatcttgaaggcatcatgctttactacggtatgttattttttcgttcgttgttccttttgggaaacttactaatttaaattagatctgattcggtcttttgatgcctgggatggagaatccgagtgaacatgcttgtccattctcagatactttgacacgtagatatgaaagtctggtatatacctcacatttttggtccagggctggatatatctcatttcgaatttagcaaatagagcaaaatcagtccaatagatcacttgttttttcacaccctctcaaaggtgccatgcagctcaaaacttcatattgggctagtcacaccgagtcaacgtaatccaagcatgaacaagatgtaattgaggatgatttgcacatttttgaagggacataaacatatagtgataactattgaatgttgatcaccttatacttcggtgtatgggataccgcagcacgtatttgttatataattgatatttcccagtgttagagcatctgaacatatctccagatgactggagagggtgtagaagtcacagattcatgtatatccatcaaatactcaaatatagtatgtgtatgcgaggatttcacaaaactcgcacaacccatgccaaaaatcaaggcaatggatgggtataagcaagaaaaagacattatcaagtgtggagtcaacgaagcgaacggaaggtatctggcacgtcttccaccacgactggtggcagctatactgggccaggacttgaagcgaaagtctttgcgagagaagaaaaaggcgaccggcggggaaaagacccgaaggcattataagtgaaataaatcaacaagaagcgaaggggtccgctagcggacgaggataggagcgaaggaaccaccgataacggggcgagcgatgaaagtaattccgggataactaggtttcatcagcaaggagcattacaggcttgagagctggttgacttactctcccgagatagtgtcgtacagatcagtcagggctcggttggtcggtgtctcattgatccaggtcgcgagatccttaatgaacatagaccgagtatcgactgaactgaccgctgccgcgaagcactcccagtcacctatcgaattgtgagtacttttctaatatggtgagccgtcagggtgtttaccttttgtgtatgtgtggcgggtatctagaggcacaccgtacttattttcaacggtcgggtagaagtcgctctgcatctgatagacagactgtggaacaaagtccaggcccagctgggcatcagcgaagatattgtagagcagacctgcagaaatggtaagcaaggcttcatagactggaagggcgctggagcttaccatggctagcggtgtcgccgtacgacaaggtggtatgtggtgggttagcatccttggcaatagccaggtcctgccactgagtgatgtagtcactggcgatgctcgagaaattagcagcgtcggcggtgtggccagtctggttggcaatgactgccatggcctgaataccgatcatgcccttgatcgcgaggttggtttggttgctaattatgccggttagttttggatttcaggaagggcagggcttactcacgctagagagccagcaaagtcgtccgtagagatctggttcgcaggataaagcgagtcctcgaccaaataactggtccactgcttgagtagagtgtagtggttattcaaaaagtcggagtcacccgacttctgcgcataagccaaagacatgatgaccatattcccgcactcttccaaaggcattttctcgtcgttgccattggggtggcccgtggcgttcggataagccgagcctaggtcgtgcatggaataattgttgggatactttccagcctcttggttttcaaacagaggagtgagcacgagtttcaggagttcggggttggtgtacaggaaaatcggataggctgggaagataacatccacagtattcatgttgccgtcggaagagatttccttcaggaacagatactgtttgtcttgtgtaccacaaagctgggtagcagcgaatgcctgccgaaccgcgagcgaagttatagtgaggtagtcctggccagctgtttcaattgaatcttgggccaccctgctatcgaaatggctcgcgagattgctcgattccgcatgatcgtggtggaagaacgaaagtgcggccaactctgtatcgaaataactcttccacaaggacggtactggggcatactgcgaagcgccttcgtactgaatagcttgatcctgtgtcagacctagtgagaagagcgtgctaatgggcgacgaatcgaccgagcccagatcgtatgagaacccgaatacgggccaggtggaggagatagctcggaaattagtgtcgacgccattggtgagttttccattgctggcaaactggccccggacgtcggtatccgcaccagactggtgggtcatgtctttcgagtcgtcggtggcccagtaccagttaccccattcgccctgctcattgttttcggaaaaggccaattgagtctgtcggtgtaccttgtggtaggccacaccgtcagtggtcccatactcccattctgcaatggcattccggtcacccgatacccattctaacatgtcgtcagcccccgcatgtaagaaaagagaccagcgcactaacctgcagagatgtccgcgtagacctgtacatcatgcgcctggccatcaagagaagagacctcgacattaagatacgagaaaacgagggactggcgcttgaagtcggtgggtgtaacaggcgacaagaaagtaatgttcatttcaagcttattctccacgttcatagtgaagatacttttagtcgaagtatactcaaacgcggtctgattgacggttttcgacccaggaaggcccatccaagtataggtattgccatcgacgcggatcatacctgtccacccggtgacctgattcctgtatatcattagtataaaattcacatatagtcaaaaggaacttactgccaaaatacaggccattgaccagccaagtacccaccattaccaccatcactccctacatcaagccaagtgctgaggtacggtgacctaacagcgagaggtatagccgggggacgagcaggggagaaggtcgactgtgctccaatagaggacacaaaggaagcaaccagcagactgaggcggtacagctgcatgatgacagagcttgacggaagatgggatacacaaagtccaaacaagggcaagattgctctgttatttatttgcaggaaagggaaatgagctctagggagcttgactgcatagcactctggtggggccgaagaaagggatcggcttatgtttactgaagaggaatgccagtgacatttttatagtcaacctcaacccacgaagagagggggaaagccaaaggcccgtccgagacccgcatgccagaatgcgctctctacggaggaatatcaaagcggcttggtatatttgtctcaataaatacgaagtgctctaatctgctgacctccctcaaggcccgagtggaagaagattcatgctaaaggtacaaagtgacgttagggggatcaggacaggggtattcaagtggagtggctgtggaatggtggtggaaatggctcaattcaaagtcaaatccaaaaacgcggtctacatcttccggaagtaacggcataccttcacgtcgcatggaagacaagcagcggtctatgcggatcgacaaagcgatggcccagtaaacaagcgcatcggagtaatcccgacttctagttcggtgcgcgccttgcaggtgacagacttcatagcggtatggtggcgcaaataaaggtgtagaagaggactggtgagaaaaagggatgcagctgcgaaagaaacggaggtttgagggcatcgccgataggcccaggacaaataatgaggcacgagtcaagcgaattgccaagttgatgtccttcgtgatagtatcatgcggacagatcgtcggctttacttcatgcatgtaatatccgataaatctgcggggaaatggcgatcagcagcgtggcattcagcccatgagagaacagaatgaagatatttgaatagccacggtatctagaggacggaagaattcgggaagctgcagagaataatcatggcttttggtctcaaatcatatgggttccccttgcagagtctgcgtgtctctgcgtgtcagctttggcagcggcagtccgatcggagacaaaacgacttcaaatttctatcagacctagactcttgtgttgcatgaaccgtgtatgaatacagagtacatgggccgaggtcgcgtgcgcgaggtagtacaatgcatctagtttgaagctcacgatccacttcctattgaacctccttgctgcatatgtcggcatattcggttgccgacatacattttccaagacaagaacataaaccttacaattcaatagaactacgctttcggtggtctccggatattatcttcctttttgtcctccggtgaaatacttcgtgtgtcagattctagcctacgaccggccttgctactgtgccatcgctcgaagggttttattacaccccgtgatcttgcattgatgattatttacgtaagaacaacagagtgggatcgtgctccgcaagtccaagggcttctaggcaaaaggcaatgtcctcaacctccaatcctccggagtaatggtctattgtaagcgaactctcgggtttgttgtggcatgtggagttccccctatagggtttgatactcctgccgatcaagaatccaccaccccactaaattgcttgtatagcatatagcacgtctatttaatatgcttttgtacaagagaaatttactaggaaacatatatgagatgggcgatgagcattatcctacacagttgcacattggttgattacctcttcttggtcacccagattgtataactacctaactacgtacatcgggttgtgaggccctttattttgctatatcttagtagtttaccctggagctagccttccagctgtttgcacgcccatctagcctctctgagattctagccagagaaaagagaagtcagatggctgtgcaaagaattggaaggctagctccagggtaaactgctaatattacagcaaaataaagggctttataacctgatgtacggatacaatctgggttactaagaagaagaagaagagaatagatggaagatgatgatctagccactgccatgaagcttctctaaatagcttcatgtggacaaagacacaaagatctcttcctctagaatctaggagaagcatcttctgcaagatgagcaaagacagagaccgctaaaccgggtctctgcagactagataaagaagctactaacacaacaggaaatatgcaaggagagtaagagactgccaaagagaggtttgcagaactgcataggaaagagcgagcatcggacaaaaacgactctgcaatgggaaccgtttcgaggcctgtttttacaataacagcatggagaactacacatagtatagcctttttccatgctatagttacttcaagacactcgcattattactaatcatattcatcgggaagccctacctaagaagcagctacacgcaatgcacgttagatatcaggagacaatcaaaagtaaatatacaaaaccaaagccaaggatatagagagcatacacgcaacaaccaagcaaccaggtacaaagtaaaaaaaacacacgccttcagcaggatccgaaaagcacaatcaagcattccgcgccaactcaatacaaaactccccccaatcctggcccccattcagcggcagaatctcctcggcaatagcctcctccagacgctcatggtatcggcgcctgtactcattcttcacgaggtcgagatgtctaggctcccaatgcagccgcacgagacgggaaatgaggagctctgagcgctcgcggccggtccgggattcgcgcagggcctggtggaggaggagggcgtcgcgcattggtctgttgattgcgccgttgaggatgtgggccagggtttcgccctggtatttgttagtaaggattcgatttcagtattgactggaggggcaagatattaattaagtacgtaccaccagattccgcgacttcgcaatcatagccttcgcaaaattatgccggtagatatcctcgtacgagcgcagcacctcgcgcagatgcgaatcactcctcaaaacaataatatgaatcatagcagtctcgccgccctcgcggacaatcgcgcgatgcaaatcctgcacgtcggcgcgcacgagccgtctatccagtgggtcgcgatcatcctggcgctggccctcgagtgcgagcaaaatcgccatgcggaacttgtccgcgcgcagctcggagcgcatgcagcgctcgagactgttgtcgtagcggctgtcgcggaaggagtgtttgatttcgcggattgcggcgttcgtccggcccatcagggactcgattaggagttcgcggcgggatgtcccggcttggtagtagcagttcgcccagtaggcttctgattcccagcggccgagggcggtcgcgtagcagactttgccgaaggaggaactgccgagtttgaggcggaggtgtttggcgatgttgattccttttccttggaggcggacgcggtttttgtattcgtggcgcaggaggatgatttcgtcgcttgttagccggggcaggatctggatcatgggtctactgtcgatgttgcgtgtgtggctgagggcggcttgcagggcggcggcatcggggccggcgtcgtagaaggagacgcgtttccggcctgtcgttggggagacgaggactcttgcgtcggagctgcgggtggaggagcctgagtcgtggcggccgtggctggtttttgggtgggtgaggcgtttgtcgtccttgcggttgtcgcgcgaggagctgcgctctttgtctttgtctttgttgccgcgggagcgggaatctttctcgctgacacggacagacgagcgcgagcgaatgtgtttgctgcgtcggcttgagtctgacgctgagtttccgtcgagtggttcaaggtctgagatttcatcgtcacggatggaggggatgatgatcgcggatggcatcggtgagatggactggtaggttccatgatacggctccagcagcggactacccgggggatgagccgaattaggagcactggctcttccaacagcgagattattcgacgaggacacagagctgctgtgtggacgagcactcgaccgactcctaggcgcgatctccacaaactgaggctcaggctcctgtttattccgagatggctgctctggcggttgctgcgactgcggctgcgcctgtgattgatacggatacaaattctgcgacgactgcggaatcggcctagaaaactgctcatgggtagcagccgggtatataggcctaggcgcgggcggcgcgggcggcggcacaggcaccgtcttcgaagaatacttcacattaggatcaagctgcgcatactggtacacgcccggattcgcataccccacagcaggctgcgaataaccagtctcactcgagggagtacggtaatgcgaaggcgcataagccgcactcgtcggcgcatacggagcctgctgggccggtaaactagtatactgcagcgacgtagctcccgagccagcgggggagtttgacgctgcagggaacgcgccgggcatagtagtagccgggccaggctgcgaggagggcggcacaaacccagggcgttcgcattctggcactgaggcccagtctactggtgcggtcgcgtaggttggttgtcgcggcgcggacgcggaggcaaactgcgtgggctgggcatagctgtatggattcgggcgcgcgtagctgggatggttgcctggcgcatcgccgtaggctagatcatctgctgagtcggagtcgtggtgattcggattcggattcacatccaaacgactgtcgcgggctggcgacgggggttgacgatgcgaccgtgacgaagcggcggcagaaccgcgctcctcgtctgagtgttggtagcggtcatcgcgagggtccacgtcgtagcgggcgcttcttggggcgtgcgagctgccggcgcgcgactcatctgggttctcgcgacggcgcgagctgataagcttgtattggcgctctatttcggcttcttcgtcggggctgtaggtctttgctctggggatttcgacggctggtgagcgcgaccggcgagagggggagggagagggagaggggattcggttgtcgcgcgaccgcgatcgcgaccgtgagggctcgcgggcgggagatttggatcgggtttgcgaccgtgggtcgttcacttggagggacatgtttggtgtggggttttgatcttggtatgcaatgtgtgttcaacgggtttatttattttctttttctgcgaggtcttcagtcgcataaagaagggttggactggagggtttctttgtgtgaggttcactaggccattctataattatagctatgaagcctctttgttcaggtgaattggaaagaaaagaaaggaaaggaaagataaagcgaggtttaatagccgctggcattcgacggcgccaacttacctcgagctaatctgtgacacttcaccctcatgtagcaagtattagcggctcttattggcttacagctggactgaagatcgtcgtgaccagcgcttcagccgcagacatctgaccaatgcgcatgtcagattgcaaaagaggaggtcattcatggaaggttactgtagaattacggagaattcaagataaactatcaaattaccgtgcaaacaatagatgaaaagcactagtacaggtttcggatttcgaaccgttttgtcagaagagaaaggaaagcaaaggtatgacataaaagaagccctgcgaggtgccaggccgcgaagaatgggggtatgtgcagaagagaaaactatgggaacagaagaaaggggagccgtttatcgcttgcgacggccatcgtagggtccctgacgaccaccgtagttttgcttctgggactgcgtcgtctgtccgttgcggttgagacggttggttctccagcgctcataccagaccacgcgactggcctcccgcagctcggagcgccaatcggaaaagacggagtccttcaagcggacaaagtcacagtgctcggcatcatatggatctgcgaaaccccaggggaatcggcgaccgacgggtttgtcgccagctgccagcgagtggggatccggcgacagaatcgagaagggaacgtgctggttggtggcctgcgacgcgttggaccggcgagtgctctggctgcgctgcgacggcgagccggggacattttcggctgcggtctcagactccttggcttcgctggctccattctcagtctcggttttggtctcaggctcttcttcatccgcactttccgacgacgagtattcatcttcctggtcctccaatgtcaagatctcaagggggtcgatattggcctgcttcaagctgttccagaccgccttgcggagatagctcatgtgggcggaggtaatcgtatccgccttgctgatcaccggcaccacagtggtcttgcccaacacggtgcgcaacacctggatatccaagttcttgtccagaatcccaatgacaggcgcatcggtgggcttggacgtgccattggcagcacgctccgccatggcgatgttctcatcaagacgcacaggatccagaagtaggaaagtgcagtgaatgtgggtatcacgaataccgggagaccggacaaccttcatctcctcggcgagggtctcctcaaacttgctttccaggaagcctgtcacgccgcgcagctgaagatctgcgatgttccgctccaggcctacagagtcccacagggtaagtccgacacgttctccgtcgaactccgtttccaggtattgcgatgtgaatccttcccaggctgaggtttgccgctcaagctcttcgacttcctcaggagtgcgtgaggggtgcttgtgtgcgggcatggtcagggcactgcggaggaagttgaggaatgaggttttccccgagttacgagcgccgatgacaagcacactatacaggttccattattagctggtctggttattgatgtctcttcgcgactcacttgtatggggtagggtccttgcgacggcgcacacgacgggggctgttgacggtgctgacagcactgctagcatagctgtaccgaccacggtgggtcatgctctcagagcgcgcatagggatccacggtgtttgttggcgcagccatagatggcgcgggggcttcaggctggcgtgttcgggctgcgaccttatcgcgttcctcgcctccaaaagtttccagttgcggggcgggggaaagatcaggcaagcggggagggaccttaggggcataagactcgcgctgacgacgcatctcatcttccatggcttgggttttagacatcttcttgcgagctttgtcgcctaggggttcggtggatttagaacgacgaaggaagccgagggaggtgcgacggttgatgtctgtttcaggtcccaggcgcgtggaggttgccattttgggatgggcgtttgtctgttctttcctgattaggttgtttttcttttcttttcctttctcttattatttgctcttattaccaggcagtcctgaaggtatctctatcgggggatctcgatatcgcataacccaccacctgatgtcagggggaacctcgggaactgccactcaccaatagaacgagatatatcggagtccaacagcgcttatagtgcaggtcagatccgatggcgcgatttgaaactgctctgaaacagaatcagacggaatcaatccacctggtctgcggatgtatcgggtttctcaaaaacgaaggtatctgcaacagagaaaggaaagggaataagcgagagtggaatcaacacaatacaggtgcccaaccagtgggtgaaggaggggattgaaattcggccctgaacagagttcgaacttcaagctctttttttggggatgttttttttcttttggggaattgtaaataagcctgctcacagcatccagcaacagcggcgcttggagtaatgtttgaaaaggggaggagagaagagaaattcaattcacactaattctatcgggaagatcgagatgatattgaccatccgacgttcagacattcagcattcaggggtaaaaaagaccatccagagctgttccccacttgggagctttggtctctctttgttggttggagagctaaagacgggatgtatgggttcacttgtacgagtcggagtatggaggacaacatacatacagtttaagcaggttgtggaatacaacgtgggcctttagtctccacttggatattccactaaagatatacatctagacagttgatgtgttgtgttggatgtatcggatattacggagtcaacgtgtttgtctggtttgcactcgtcgattattccccagttcggtccaaccgctgctgaaactggacattgtccggagcatcgcaccaaagctaacccgtctgtctctaggccaaaagtatcggctcatctctgctggaaaagccgagaacgaacacctaatcaaactaaccgccaaactacggattagtgcgccaactaataaccataacctagcatctgcaatacgagctaggtcaaattctgaaacatgcaatttgggatatcagcccaaccacgtgacatcctgcatgttgtgacgggtggggccaccgctggacaataatgaccttcgttgaggcagttcatcaaagtctttgtatattgtatatacggagtgatacagttggaactgtgttgttccctcactgcagcatatatacagagtactccctcctcctaccctcaaaactcgcattcccctcgagaaataacggagtggagcaaaagtggggtggatttccattgcgtgcaggaactttctttttgagaagaacggtaaaaggacgcgacggagtaaagggggagtcgaattaaaattcccttcgatgctggaactgcgaactacctctgctcttatctgattgttgttcgtgagggaagccagctcaaaccaagtcgaggcgtcgcatttaatatttactgatatcaccaggagcaacaagctctaaatccgagcgtctttccactcttatcaatataccgaacctattctcatatcttatcactattgcaatatccacagcccacctctaaggctccaaccccaactttaagccgcatccacggagaaagtcctgaacggaagcacaaagcacggcttggaaggacacaccagctgtctatccaagctcttgaacctaggaccattaggaccagccacattcttggcctcaccgaagagcgtaggctcattaggcggctggtcgtcaccccatctcccattgaactccaaccacgccacgggatctttagagtccaccgcctggaacgcagctgttgttccatcataggtataagtgtatacattgagcatgggatcccacagcacgccgcggtccgtatagtccaacagaaaccctgcaggcaggttgaagcccgggaaggtgtggtcgtgttttctgtgtgtatcagtcttgccatccgccagactacagaaacttatctagacttaccctggaattgcatagtttgcatgcgtaccgactgcagagtacacatacggccgcttgtccttcttttcaacggcggcgtagctgaacgcctggccgctagcatgctgactgtaccatattgcgtcgggtgtgccgttgacgaagcggatcatgttatgttccctttattgtcagctagaacgactctacccaggcaattcttcacactaaccagtctccgatgtggtcgccaaattccaggcctaggactttgccgcctttgttgaatctggatcgatcagtataaatgtagacttaacttaggtacagtcgagcttacgcatagaagtagaagtagaacgcatcaacggttccgttgccacggtctgcgatgataaggacactcgatgtaccatcaactgttcgtccctgggcgtccggtctgatccctcggaaccaggctggctctgggttggcttcgatgccctctagagatgttaggtagacgctcgtattacccatcgaattgagcgtgtcgaggttgttaagggtcaagggtgattccactccctcgatggccctccagttgacattgggtctggtgtgatcgagctgctgttggatatcgctcggcatgtatgtttcctggctatggagccagatcaagggtgctgtagggcagaataagtaaactcagatcatcatcaataccatgtatcgcatggtttgtttaccatattctaagacatatggcgggacatcagtagccctgtcgccgagggatgcccaggccggtttggttgaagatagaccgactaccgccaacgatatgaaaagacgcatcttgtgtggcttgtcctcgagtactggagagcgacaagcgcccttttaatctctatgaggacaatcataccttgcacttacagcgatgtttaacccaaatgtttatcggcatgacctcgtcatgggcatgggattcgaggatataggatatactacggggcgagaagcagatacgaaattcgaagtaatagaatttcacaatcacaaggtcttctgctattccagcgatgctattgattcctcgaagtgtatgcgtctccttgacggggatcatgccagtgttccgagcagcggatcggagtttcaatctcagacacaagaaagtgaggccgtggacaatcccaaggtgtactcaggtggtatctctcctgcaatagggtgtgattgttgaaaagttctttgtttacctcctttatcctccggcataaagtatgcaatatgcaaccctcaggaatgtgagccttatatcaggtgcctcgtgggtgcagtacaagagtcacaatatatcttttagtgcccaggtggtcataataatagtgcgatctgcatcagatcccatggctgaatatcattgctctaaattaatgatgtcacctgcccatgaagctatcacgacgaatgttcgggcttgtatcgaatcaggttgagttacttgtaattatatgcatctgtataaaatggtgagtcccaccaataaaatcgcctacctgtaccagccgttgtacctatcttttgttttactcttcataatatcagttaccgtattcagcattccccatcgaaaccatgtatactaccaacatgtcggccacgatgagatctagtcgctcttcattatcacatgttgatcccatgaccaaaattaatagtacatactatatattgagctggactttcctctatatataattttcatttgtgcatttgtactttcttaaccgaattcatgaatccagcctctcctgcttcaactagtccttcctcagcctaaaaaccctcaaatccaacggaatccgatccccaagccaagtggcacgttgggtgtgatttcgctcatcttccgacgccacagtattagggtgaacgagagcactaagcggaccccggttaataaccagccaaggaacgaaggctccaaactgcgcaggtgtgaacagattcacttcgaacattgccaccggatgcgggccaatcggccggtcgaagaatctataaatgcgaagttcggggactgtttacgaagcataagcaagagatcaattgagatgagcaacccgaccccgaccccgcggtagacggccagacctgcagttccgttcctgggctggaagagtgcgctgcttacattctcgtctaattcgttcccagagcgctttggcgaatgcggcttggtcggggctgttctggtcgatgcgtcagtttcattgtcgcttggctttggggcccggcggcggcacctgcacttacttggaaatgatagatgtggacgtcgaagccaccttcccggcctttggagagagggtcggggaattccgagtaggctttgcttaatatgccatgttggggatttttcattgacttgccgtcttcggcgcgctcgctgcggtagatgataagtgtcttggattagatgtggttgcgggacacttactcggatagcggctcgaggttttcgtaccccgccaatggagatgggtatgagaaagcgaatgcgtctgtcattgtgagtagattgggattattgaagaagatgagaggagagcagtgggtatgtaaagatattggtgtaagtctccgtgcaggtagttatatggcgtattgacttgagttgatcagcggttgcaaatcaatgcaaagatgtctagtaagcattcaatcttagatcaaaaatgtcgtcagttagacttggagtatcatcatctgtcaagtctgcgggtgactttccgcactctgacaaagccgcggaacggacctcggtggtcaggatggtcgaggtcaactacgatgtacatcgatgtacgatgaataataaatgaaatacaattttaagtgagtatacaagatagcaagtactaactattggttttctgtcaaacagagtgcttgtttagaaacaatattggcttaatcaatacacttgggagattttacgccgttctctccacaaatatatttcagggctatgattatagaaacaacgacttattgaaagaatgtgatattgaaaatgtagctatttcgtatagcatagacaagactgcacaaaatatgaatgaaatccagactaaaaaatgaaagttacaatatacaccttggtatcacccatagcacaatcctcaaacgccgatcatcaaaacatccagtaagaaagactaccaagcagcccgaatgtcaatatggccatcgccatccacgaatttgccgcgatcccattcccgtccttcacctttcttcgaccactgtacatcctctggtttgctttctccgtccacacccgcaaaagcagtgttgttcttccatttatcaatgacggcctcgtcgattcctgctgtacgtagcctctcctcgcccttactcctccagcgctcacgatcgcgcaacgcctccattgccatgtcccagtcgtcatcttttgtcataagccccgcgacaggacgacgagatgattcctggcccatggagtctaatctgttttcatctagatgcacatcggtagccgggtcgtagccgggtgcaaagtgagcatcgatattgctcatactgtgtttatagacacctcgcccgcgcgagcggataggtggctcgttttgtcgaggagggagtggtcccacaaggtcttctaggggatcggattcgttgcccaactcattttggcgtgcagttaaagtagccaacggcgacaacggcgacagccgtctatgccgcgtgctgggttcaaggcgagaacggcgggagccatgtggcgatgcatcttcccgctttggtcgtcgagatttgtacgactctggtgagcgggaacgggaaatggaccgagcagaatgtccagattgacgtttttgtcttcgatggcgatgacggtcggtacttcggtccctgcgcggagaacgacttggagacctcgagtatgaccgctcacgtcgccgcctggtgtgttccttatctccgtcccgttgatctctcatagattcgtgatccctgtggtcacgccgatgtctatcgcgggatttgtctttctctccactcccatcatactcttcgtttgcccgtcgatgcctccgcgaccggtctcgttccgccgatggggagcgacttcgagttcttttccgatgtgaccgattgcgatcttcccgatctcccctccggtggtctcttgatcctcgaactttacttcgatcatcagatcggtctgtcgaagtggggaccaaggcacctgaagcacccgatgcctgatatttcagctggcgcatacgctgtcgtgcttctctttcttctttgagcttgagagctgtgttatggctgtctgttactttgatgagatttcgtaggaagcgggtattgggttttggggcattgcttgtcggcctgcaggtgcttgtcagtttcataatcatgcaaaccgcagattatgagagaaaccaaccttgaaggcataaaagcgctcattccttgagacgcatacttgatagaactctccttagcctccttggccaggatctgcgcaacatactcgtcgtccatgatccagatgagccacagatcgtaggactctgagggtgtaaaggagtgcaccgaggaaagtgaggaattcaaagaagagcaagtatatatgctaggccatattaaaattgaacaaagaccgaatcctctttagttgaaagaaaaccaaacgaggcgaagactcaaggcgaaagcgccttcctaaagtcgtctgaccgcctttgataaggctgtttactgtcccgcaaatgttatgcccgcagtggactcggcccctctaagctctctacattcgcaaatctcgtcggcttctcttgtcagaggcagattttcgatgataaagccctacaatatgacaaactcatcaactgaagcgcttgcagcccttcagcagctggaggagaatggcaatttgaaggaccgactcgcgattattcgcatcagcgagccaatttccaccgaagttggggggtcttacccatctccttcaaaaagaacctctgatgtttccgtgtcaaatttcgacgatcctactcctgcctcattggaggctgatcttgcacattacaaggtccgcgatgagcccgaatgcccgctatccagaccagcaaatactgatgttcgcataggaactattctccaaactgcgattctcctatctcgagcaagtaacgaaagaaaaattcttgcgcgccattgttggcgacccgcctatggttgtcggacacaatgagaacatggaactggagacgcaactagcggacgtgaaagcccagctcaaggcccaaaaagaagacgcacggattatgattgaggaaatggagctgatgggccgtgatttggcaagccgtgagtagtcaatcaccgtggaatttcaacatgttgactgaagcgtccgcggctatgacaggttacaaaaatgtcgaacttcaaactacgcagctctcaaccctgcctgcttcaatcgagaatctcgagtccaccatcgccgagctgcgtgcaaagcagatagccaccatggatccttccgatacgaatacttcctcctcgcagaaccttcctcttcccgcgaccttggcactgttagcagaacgcgaagcggaactggcagcattgaaccgccagctagccgctgtacataacacattgcctcggaagactcgagaggccgaggctgtagagagagagtgcagcgtgctcgagcgacggaagtcagatgcgatcgcgcaagcccgtgaagcccaacgcaagaagcaacagggcgaaagtgatggactcgaagagatgggacgttggtacaggggggcagaagagaccttgaaagaattggtagggacccaggcatgataacctgcaggccaagcctaggcttgtgtacgatgacatgagggacgaacgattgaacttatattaggtggggactggcgtttaagatctactatgcatatatgggtccgtggatattataattccaggttaagaaagtatggtaatggtatcattaaatcgggttccaaattgaagccttgcggctgttttagattcattgtattgcatgatcgtagaacatgagacgctatgcagtcattttgaacctccatggtatgaaggcgccccaagcgaaacccgaccgtactccattttttggggaatattgggaataatttattcctcctcctcctcctcggcgtcctcaccaccagcggcagcggcggccttcttgcggcgaacacggccgggacggccaccaccgaagggcgaggtgagggagaagtcgatgtgcttctgggagtcgagacggaccatgaacgagggaacgttgacgatctgcttgccgacgcggatgtgacgctgcttgatcaggacacgggcgtggtggatggacttggcgaggccgagcttgtagacgcaggtctggagacggcgctcgaggaaatcgtcggccttgagagccaggacgtaatcgagcttcatgcgggcctcatcgagcacaccgatgcggacaagacggcgaatgagggcattgccttcgaagagacgcttggggtccttctcgtcgagagtaaggagctcactgtggggaagatgaaaaattagcgctatgtccaccaaattcgatttgcctaggcccgatcgctcgaaacctcgcaaaatcgcagattgttccttgcacataccgagcagcacgacggatcttggagagggtgagctggacacgccacacctcgcgcttgttgcgcaggccgtactcgccgacagtcttgagttcagcatcactagtaaaaaatgttaggaatatgaacacgacataaccagaagcacgcttctggttagtggccggagagtactaacagacgagccgactcgaaggctatgatggagttagcatttagatattcaaatcgatcatgttgctgggacttcacttacgacgacgggggaccttgtaggtcttggaggaaacgcgactgcacagaaatcgattagaacggtgtgatgccttcaatttcgttgatatactcacggggccatggctgcggttagatgggcggaggttgtcgacaggaggtcgaaggatcaaatgaattgagaatttgagtgtgtgtgatgcgagccctaccctagtcctaattgggaaatataattatgtcagctgattatgtcattgagcctctccaggtccatgcccaggtccaccttctcttttcagcaacattcggaatagccggcccttcaatcgcctgaaatggatgcttgtatgcattctttttttggatatatttgtctggattacttggttttactattacagctatttgtcttaaagaacgtcaaattcgggacattttatgcatcgctgtgactcgggatctttcttgatgttgcaggcagatcgaaaactggcattatgctttcttgcgccatagcaagtaggcgaaggcgatatgagcccaaaatacttgggttgttgatattcatggcagtgagtcgctagagtctgaattctggaactggctgctggctgctggcttctagatagctgacatcgtgattccggtgcgtgaggatgatattgttgttgccattacagttcactacactgcatccccaattgaggcgtccaggatataagtgtattatattggaagatccccttgagacctgccaagcaaaatcgatggtgtagtcaagaacaccaatagtatctcccccaaacgttaccacctgcgcgctttgtttttgtctggtgagtcagtcactatacaagatactatatgactgaacgagataaattcagaaaggaattaaaaaaatccggcagtttctgaagcattggcatgaggagaagaaaagcattgcatgtttagtatttacaaatctcgaagtcaagaggaaaactcaggctttgattggccggaggctgattattgcgctaacccaaattcagaaaaatatttaataatccaaaagtggcgtagcgtggatttagcgagagtagacatgattatgtcatgtcaatcccacaaattgttatccgacactctagtttttcgtgttgaaggccccgtcgacagttaaccaccagcaccaaccacaacaccgccgtcatgcctcactcgtacggtctgcgcgccggcactcgggtacgttctgattctatttgcgacacgcgtctttttcatactgggaggacgacctggatcaactggatatgcctgagggaggataagtgctaacgaaacgacgaacagtatgccttcgcccgtggcttcaaggaggccggtatgatccgtctctctacctacctgaagacctaccggtatgctcaaaaccctcgaatatcgaattcacgacaagaatggaaatctgacggatatttttagtgttggtgatattgtcgacctcaaggtcaacggtgccgtccagaaggggtcagtacaattccaaaattccttcctgcgctctcgcccgaccgtccaatgcgatcatccaccatgagcagcgcgaaacccggaaaagaggacgagaatctaacagttgaacagtatgccccacaaggtctaccacggtaagaccggtgtcgtctacaacgtcaccaagtccgccgtcggtgtcatcctctacaagaaggtcgacaaccgctacctcgagaagcgtatcagcgtccgcattgagcacgtccagcactcccgctcccgcgaggacttcatcaagcgtgtcaaggagaacgccatcaagaagcgcgaggccaaggagaagggtgtccacgtccacttgaagcgtcaggccgttggcccccgtgaggcccacttcgtcaagcaggctgacaacaagcccgagaccgtcgtccccattgcctacgatacccacatttaaagggctcgctatcgaattgggacggtgtgtgcggttgttaggtgtttactgggttttcactccatttttgcctagactgaaatggactttgatacatgagacgaagcgcaaagggtttcggatgccctggcacatctctcgcctgtgcatagattcccctgaatgaaacaaaatcaaaaaatttccgagttcatgtctacatctttcccggtccagcataacttatatttggtgtattgttctaggcctgtgctgtagtgctattcgttctcgctctcggccttgatcgtcagccccatctgagatcagtgtactcagatcaagtatggttcgaactttgagtcataaattataatcgcttactagatctaaatgttattgcgatgatcattgatactatgctgtggcgcgggtggctttacgagtgtggcagagcgaaagggatgatcatgacatagatgcactgccaccgcgacacaagctctctcaagctactccgtatagcttcaaccaacatccgaatccgcacaagttgggcattgtcgccctctaggccacccaggtgccatacctaggctaatgaatgacctgaaccgactcacccatttaccccgattctcctgctttcgtcgaacgcccaatccccctaccttggcatcatataggtgaagtacccgatctcaagcaccagctaccggccgacatttcgcaagtcaaccgtattccgcagaccgcctctttcagctgtggttggctactctatcctgttctagacgattgactatcgcttgcccctacccaagggagaagctccacattcgatttgaatttgtccatgttgctcactctaaacttcaggcaagcacttttacccggtagcgcgggctacggatgaatgaatttcttgttgatgggctaagtttatgttgcattgtgagcgaacacctgaagcgagtgaaccgaattcctctagcactttatgtacccgattgtattaatcttgtggtatgtctaacacggaaaggttctagaagtttatctgttcgatatgttgtcgaatacacgaatacccctttgtgtttcagaccgaccatgcagtggaggtttcaagagttcatgttcgcatgtgaccgtaagtagagagcatgagggtataagcttattattacattcaatcggtctagattgatctttgtggtttggctaaaatatggttcctacgtaatggcttagatcgaagcatcttggataatgagggtctaaagttgggtacacagccacatgcaaagtccatagatcacgacacatgacgacattcggcgataactggatgtacgaaggtggagattcaggaacaatgaatacatgtaccttctgtcgattatcaagggcggtatgattgctggacagatgacctttgtctgatgcatgtcccttccctgtacggcatgcgatgaccagccactcccccgggttttacgcctcaggtcatttagaccaaaatcggagtttctgctgtgagtaggcccggatgccagactgaacaggctactagctgtcaagctcctatttaaatttagcgccggtcagcactataactactgagtttctgaaaaaaattgttaaatgcgcctgggttaaaaagctctgggtatacaaaacctggcaactcaatggatctccagccttccccaacaacaccgctgccactctgctcacccgggctatcttcgtgggcaatgagatagtcaaggcatgaactcatttggcttataactcctgcttccccccttcctagaagtcatcaatccgcactcttcagaatcatagctcgtaccttggctatttctgcaggaatctgcaccgctctcttgcaataccgttgagtagcttttctagctacgaagaaatccattttattccctcctctgtcaaaggccgtgttcgccaccgctttcgactaatttccgtggagatgggctctaataataagtaagccggctagtttgcccaggtgataatatatatgaactcccctgcgatacacccaattcaattcagttgtcattggtgatatctcactaagaatctgtctgacttttcgatttatctgttccatccgctaaccttgaccttctctcagagtctcgtcgtccgacctccccgcgactaaagaccccggtaccactagcaaagacacaacatccttcggtcaagataacacctcgaagaagtctgcatccgcctccaatggcaagtcgaaaaaggggacctcatacatgctagagtcgtgggagaaggcaaccccctcgtcggagccgtggtcatcaaccaaagccacctactcgccaaagcgctaggctttggccactgttgttcattgaaattggagcttggagattgtaccagatcattgtgtaaaggattccgggggacatcggggcttggttcatctttttggtttggggtgctatttattggaaaggaaagacttgggagttatctagtcatttaactacggagtacggagtgaattaaatgagataatgatcgtcctagtgcatatcaatctaccaagtacatatgtagttacaacactgtggacgaacggcttgcatggagtggggctctggagctgtcttgctgatcatcacttgatgaatctttttttggcccttctctttggtgtcgttgtctgttttcctcttgcgggtacatatatatacttggatttgcattccttttatttccatttcacttcctcgatctagacaaggcaattgtagtcgggtactattgtgttacattgaagaatgagattcctttacatccatccacgatatctcaaccaaagcaagttgcagtgtcgttcaatcttgcattgaaactttggatgagccatggtagagatgctgtacaaccccacttggatccaaatccagtaactctaccgccgggagtacagctcgcatcactgcgaacccttttcttttttttctctccctctccacccggatttatgcatgattatttttatctaaagaataagtatcaatatccatccctcccaggcttttgaataagccgacaaccaccgatatgaagatcaatgtctgaatggggatgggggataggcgagtatcaccacaatcgcccaacttttgaaaagtatactcgtgcattattgttggccggggataagactgtttggtccaaaatgggcagcggttgagcttgccgttctagactcatcttaatcagtcaaagcgcttacatccgagtcgtctggaaaggaaattattgatttatcccgcagcagtagtgctgatgctgatcctgggattaataggccttttctcccaaccaccctggcagagctgcgcgtaaatgatgaaaaacagccatccaattcgctatatcctgccttcccaatccccgtattatgcaccttccccgctcttgccaatcaaatgtgagcattgtacggagtaatatactccgcacaagacagaagcaatgcacaacgcacggacttgaccattgaggagagctctcccatttcaacattcgctcagctggcagccgcatgaggtttctcaacacgatcgacgttagttttccgcctggcactcccgacaatggtcaagtccgtgtgctgttggatccatactgcattgcttctatcttgtgcggagtatgtatgtccggagtatggccagatactttggattcggccgatgattgccgtgtgttcgtattaatttctcgaatattattttcggccatcctattgcatttcctgcctgctccgtccaagcttctcggagatcgaatcgatacatccggagacattaaccgtttggaaataaccattccaacctttttttttcaactccaagtacccgatggcggtgggtttatacccaactggtcagctatatcgggtgagatgtgactgcatgattattactactccttacaacagttctaccgcataggtttctacatgttttcacacctaagaactggtgtagtgagggttttaagcatgtacaatagattgattgatctatacgatcttcttttcttcctcagcccccaaacctccttcgaatgtccgaactacaccacaggaaggatccaatgagttagaacggcctaagcgcccgcgattctaaagagcctttggactgcatgaaacctatcattcgttgccctagttttgtttgttgcatcccgaggggaggcactgcctcactgcttgtaatccactttgaccggtaaatcccctgctcggttgtcgactctcttattccaaaatgtctctttgccaatttggcgttgggctttgattgttcttttctttccaatctcgttctacataattatttaattggtactggctctggcactggcactggcacccgggtgcgagcgggcgtagagtagccacttctacgtacttaaggtcttcttttctcgtctcttacccttctcgtctccccttcgcgtctccccttcgcgtctccccttctcgtctccccttctcgtcgatgagacctactcttttgactaagcttcaaacaccattttctctgcttaatattattcgccttcccaaagaggtctatctatccgctatggactccactctcaataatgaggaggacgatgagatgatacattgtcctggaccttctggctcctttgcctcttcggaggagtttactggtatagataatgatatagtgagttttcatccagagatcctagcttcagggtcctaatgcttgactagtattatggatattgtgcttcaggagcctactcttctgctgatgtgacgagcttcccgaatacggatgccttccaggactctggatggatcaacaccaagcctattagtcaaattccagaacccccacagcaatacgaaaatgatctggcgtacatcaacccgggatatcccctgggggatgacaatatcccccaaagcctagaaggtgatctaggaatttcaattatcactcaacgaccagctcatccctcgggaaatcttgatcggaccacgattggaataccaaatcccacgcccttctctctgcaaccttcatctgaaccacctgccggcgtcatggaacaggttaacagcacctggagagctctcagatccaaccagcaatgtagttctgatcaagtctctcaaagcatgcagaacctcgaaacgatcaaaaccttctttcagtcaaagctcccggaacctcctgctgcatcaaccgagtactcgtcggaacaagaaaaagaaatgtatcgatgttgggtatgcgatcctcagacagctagagcaacctttccaacttttggtaccctgaagagacatttggctcagcatagtatatgcgattgcgagtggtcctgtaccgagtgccccaaagtcctccagcggcgggatagaatgcgtgatcatcttatgcacatacacaaaaaatccgatctgctcccggctgaagtggaggcaactcgaatgagacgtccatacccaactcactgccccctttgcccggttgagacatcttcttggcttgtctattttgatcacgtcaagcgtcactgtcttatttcccctggttcaaagaagtcctctaccaacggcggtcgatctcgtcgcggcaacaatggtggcgggaatggcgggaacgctaatggcaatggccatagccagagcttttcttcagccgggccaagcaattcaaacggaggctcgcagtctaaacaatcaaatattaggactgggggaatccattcgcactctgtttctgataatcggctcaacagcagccattgtcaaagcgtcattgatgccattgaacaaattcctaagggatcatctcgcgagtccagggctcacctccctggagaagacagtgcgatgcccaataacccccaaccctcacaaactcccgggttgccacgaaccgatcattcgaccaagcgcaagcgcccggacgaaaatgaagagaatctccttgattcagagaaatgcagatggtgcgatcatcacatggcaaaatgtcgacaatgccaacctgacctttgccacaagtgtggtgacctgccccggagtgctattcaaattggggcttcctcgacaacgcctgtgcaagacctcccagatacatcttctaccatcatccacttggacgaaccttactttaacgctggagcattggcaaactctgggctacctcagactatgcccacccaactgtttgacatacagttcttggacccacgatcattagacatgaccaacaccttcacgaacgatctttcccaaaacaatccgtttatcggggttgtaatggattcagaaagtcatccacctctgagtgatctcagcaacaaggtccaaaagtcgcctatttttgaaagcgataccacgttacttagcagcattggacttggcacattgattgacccgttcttcgtcagaagacagaccaagcaaccaaaagcgaaagcatccggaggtcagaatctaggcttatacaaagatcttgttctcaaaaacactccttcgcccattctggaacctcttcaactggtgtctcgttgcaaatgcgcatgtgtgaccccaactgtcgactacgaagcccacgaaagcctcaaattatcgtcgaacaagcgcatcgagatgacactaacaatgtctcgtgcgcaaaaatcgggtcatcgtctccacactcgagtgcgactcttcgtgaggctctttactatccacgcatctgcagcagcaaagtcagacacccagaagcagaggactcactctattgcacccgaaattaccgacgaggatgctgagtctgataccgattcagagcaagagctcactccctcgtcgccgtccggatccgagctcactctacgcctctaccagaccgaggacatgcaaaactggtcattcagctttgacgtcaagtgggccttgacgaaactcgcccagtggaccagcggcatagatgccgatacgtaccagaagctcctactatctgatccccgctatatactggacttgatatcgaaggatattatgtataagattttttgcttgttgatgggtcacaatgggctccttctgttctatacctcattcatacgcacgtcctgatggtcatatgctctacgattttttctggtttgccaaatatcttccatactcctcctgtctttcttttctattaattctccgcgctagatatccagatcctcctgtgcaagtctgcattcaacttccaggagatgcataatgtcctcatgtgtttaatagggggggcatactacttacatgacttttcatgaatcacgagattggacttgaaatgaaatatgattcatgcgctgtaaaagcccttctcagtctcggttttagacatctccaactataccccttttcaagaagcggtctgcgccttatcgaatgtagcgttaattaccagctttacttgcactgccaccgtcaaccgtctatacaatattgtgccgtctgccttgggtaatgcatgaaaaggacaagctccctatatgagctagggtgtaccttgcttctttttgataggagatgttttgatcgcgtgtttgatgcaggggtattgcattgcatagcagcgcatgtagcttgagcacaggtgcactagctattgcggacatgtgaaaggtcttgtatatcgaccgcgtctcaagtgacggctgagtaacgtgaaagtgacgtaagagtattacatctcactctgcgcgtactgtccgagttatgtaattatatggatgtacgagtacacgctgtctagaagacgtacatgtggaaaatggaataaaaaaaaagatatcctttgctaatacgccgttgaattaaagggaggaaagcgaatgccaaacagatccaggactagtaagatgatcctgtgagaccatcttcagtagttcggcgtttcttccattcccttctcccgatttcatcattccagctggacattaaaaagcaaccatgaaaaaatttgaaaaatcaatccctcactctgaagaaacctcaccacgcgcaaagaccatcgggtctgtagcaacagactctagggacaccacgaggccaaatgacgtgtggttcccgagcaacatgacgttgggattcttagtcttggcggctacgcttcgcgccgtgggggttccaagaacctgcgtcggcgccaccagcctggttgttggggttagggttgtagtagccctgattgaatccggggttggggccctggaaaccttgttgtcctggagattgtcagtattgaggaacggaaagaacgatcagtgtgtatgccaaaatcacttaccttgcattggcatgttgcctcccatgccaccgggcatgccgccacccatcatgggattcataccagccatcgggttcatgcccatgccacccatggggggagtcataccaggcatacccatcatcggagcaccgcccatgtttccaccacgaccgccacgcataccagcaccgccgcgcatgccacccatcatgttgccgcgattgttaaatccgtagttctgcatgccccccatcggggcgccctggaagccacccatcatggggttgggcgcggcaccttggaatccacccatgggattgaagttgttgcggttattgaagttgttgttcatgttaccgcccatgccgcggttgccgaagccgcctcggccgccgcggaatccgccagtgtggttgttcatgccgtagttggggttgccattagggttgtggacagcaccaccgccgcgaccgccggcattgcgcatcggggtatccttggggagggtcttgaagggattctggtgagggctggtgtagtgaacggtgtacttgcgcttgggggtattttgtctctcaatgttgtgcttagttgcagtcgccgcctgagccgtggtgaactcaacaaatgcttgactgtgagaacgttagtatcaatgctcggcatcgtatttgttcacaaccaagtctgtgatgttcttaccccttgctcttgccgttcaccttgtgctcgctgaaggtcacatccttcagctggccctcaactccgacctgattcgaccagcttcggacttcgtcctcagttgtccaccaggtcaattcagaaatcagcaacgcagtggtggcatcgggatccacggattgatcatcgtattccttgcgcttgattccctgggggggagcaggcagaccgtggttgagtgcgggctgctgaggtgctggctgagctccattgttgttcgccgggttcacctgctgggtctgagcgggagcaggggtctcctgcttgacggcgttggatgatccggcgccggactcgggctggttctcgggagcatccagaacaagctcggaatcctgcttgaaatctccgggctcattggcattgtaagtgccgtcgccgtagatgtcaatgtcgaagttatcgtcgtcggtagccattgcgagctagattagtatccttcggggattggatctcgaagaaattattgaaattgcctgagtatctgaggttcgatagtacaggcccttcttcttcttgatcctttccgcttctgagcaaatcaagaaaagtgcatgtctgcaggcacaagccaccaattagcattgaaaaaacaccacgaaagaaagcgcaagtagtgcaggggtatcacgatcccgtattagcttccaacagcctgttggaagtcttcacaggtaaagcgactggaaatttggccaagcccccgaagggtaacataggaaggacagacatgaaaacaaagaggccagacaatacgtacaatccgaagcgaagcgcttccggtaggcacaagacttgcgcgagctgcagacgcggtgtacagagaatgggaatcagggttgttccacgactgttggatacaaagtaataagaggaaaaggagaagagaaggatgccacagacaggcaatgaatgtagtgacggacgggggaagagaacaggagccaaagcaaaggaaggggaagaaaactcttataggggggtataaacgcgggcgccgagaaagggatttggtcaatcacgacgtcgtgggctttctcaagttcaccaaagatcttagggccgacaatgagagctggggcgatggcgatgtaatcgcgcgcggacgacgggccagaccttgggagctggaacaactattctccattctccagtccccccggagaggccaattggtcattccggagaaaccacctgttcttcttttgtcgcgacttcattcttcttcaagttctttaatctttttcaataatccttctttttcgcaatcatgtctgagactttgcaggagcttgccgatatccctaaggacttcatccgggagggttctcaattcgttcgccgctgcaccaagcgtatgtcgatcggtcatttcgcgagctcctgacacgctgacatttccaatagccgataagcgtgaattcatcaagatcagccaggctgttggcatgggtttccttgttatggtatgtgccattgtggcaacccctggatcgcatcttaaggcggaagaactgacatcgccgatagggagccattggctactttgttaagctgagtgcgtgttagattgcggatatcagtctgcatattcattgcatgtttgttgtattaacctgcttgttacagttcacattcccgtcaaccaagtgctggtcggtggcgcttaagggagaggcactcccaggagatgttcagatccatttgataattttggggagatggaaacagttgataatgggaaaagcctgcagagagaagggaggaagagcgataagaggtggtatcaggcaaaatgcccttatgaatgacaccgctctatcaaatcgactgggcactatgacctaccacgtgggactccccaaacaaccctggactacgagctttttcacactgcaaggcattgtcccttttacgttttgaattcccgtggcgatcaccatcggccacttggcgctttttttttggcgagcgataggagacagagtatgatcgctatctatgagataccaccatttttcacatcctgtatcaataggggtccttgttttacttaatatacaccctcgaggcatttattcccatctacaatatcttatactaggcttttggacggcctgggtcatatctacagtcgtggaccagatgacatgacgtattgtattcgtcaaaagagatgtgtctactcctcctgagtagatattgtgagatatattgaacacgaacacccccagggtgtgcacgaaagccaactttgaatgcttttgaaccaaaaagacatccttcacctaccatatcgtatcttcagcttcctcatcagcccatcgacgaacaggtcgactgcgcaatggacgtcggggtcgagcgtttactgcattttcgtgaaatcggttaaactcagggatatatcgtagtctgtcatcataactcttgccaagcggtggatctccctcgtctttagtagcaccggcgttccaggaatgcacagtacaagtgccagtagacaagccccagccattccaagaagttgctgaacacagcattagcaatttctactaaaacgaacgttctgggatatagttacctgctagcattggcgcacttgggtgccagcttgcatcgcggacgcaagtcctccacagcatctccccactcatctcatacgctgtagcataggcatctggatcacgcggccgcgaattgagtgtcgcttgaccaacgtcaatggtgccggctagtgtggcatccaagttgtacacataaaccttgccatcctcactcccactgtaaacatagcgtgagtttgtgcttcccggtggcgagaagtggcagcggatcaaggttttgaggactcggtggccccgatatgtaacaacagaacagtcattcttggcatttctgcggaactggtctggatattgctcgaatcggtaatcgaagccagttgtgtagtcgacagggtcgatgttttcgatatcggcggtggtcatcatcttccgcagatcccaaagcttcatcgtttggtctttgctgtttgataagacgtatcggccgtcgcctttgctgtcaacgtacgttagaccctcggtatggcccataaaggcaccggcttcacgcccatcgcccattgaccgtcggtcccaaacccgaattgtcgtgtcgtctgatccagaatacaggatatgcggtgatgatgtgtcgccgtaacacacagcattgacatgatgttgatgtcgatctcggaggtttagaactggctgtcgtgtttccagatcataaacgatgaccgagtcttctgatgtgccagcgacaacctcacgtccatctccggagaatcgaagagaccagatctatcaaaaatgcactaggttagccattgaaatgacaattaaagcatcacttcacataccccgaagtgtgaactaccccaactccgtctacttcttcggcccggtggagcagaaaagtctaaaacagtaggatctgaatcatcctctgggtctgtgctggccatatatgcctgacttcgtatcgaactgtagacaaggaaacggttgtcggggcttaacgtcgcatctgtgatagtccactggccgaatggataatcgacggttttgtagtatttccagtcgtaggggttggatgtgtcgtacatccgaaccttgaagtcttgtgcgcagcagaaaaagaaattgccatcatccgagaattggcctgaataacttcgtgtgtcatagtgaatgatcatgtccgcaatcgaacttggaatgaggccctattaggcgtcaaacgtatgcgttagccccgcagactgttttatgatacatgtgccgactaagttggcctacctgagaaatagactggttggctcttttctggactccatcagtatcaatgcctagttctcgccacattaggcttgtcgcgagagatttcttgcgctgtctgaggcggtcgacataaaattgatcagttccgaaatgaccttcgctcatcaacttcttgccctccgggttaggaaccggtggcagtttaagagtttcggcggatcgtctggctcggaggcgatttcggaacatgggcaggaaatcgtcatcgcctacaaaatcatcttcttcatcttccatctggtcttgctcttcttccatagcgcttggccaaccattggcttggaggatatgttgtaagccactggatgcaagtaactcgaataatcgggaagccggtactgtaatttgtgagaaattgtactgataccctttgagaatttccagcacaacgtactacgagtgcgcccctcattcaggttgcctgtgtcctcgctctccgaatcgtccgctgtaagttcgatttggatgttttcgaggttgatgtggttatagcctatcacagggaagcggttagtccatttgtatagtattttgaggacatatatttcagtcctaccacttgccccctccgatctcatttgctgatcattgagtgtgtcgtcctcccatgcgccatcgtcctgggatggctctagcgcggggtggtagtcgggatccagctcgtcgtcttccagccattcgtgggcaggatgccagatcccttctgggccccttggagattctctcccattatcaggtgtccttgaactcatagttgtgtgtatgcggtagtgatagatgaggagatatggtgcttatcgatacatagatgataagtcccgacctcggtcacgggcgctggctttgggttatgtcattcaccctaactccgaggctaaacgccgatgacggcttgcacttcctttgtatctcaggacttataccttctagattggtatataaatttgcctcttggtttcatgcactccagtctgtggcttgtttcgagcaagcatagtactcaatttgacctttaaaaaccaaaatgggcatattatatgcaaagaagcagaagcccatggtgactgcatctctagctttgcatatgcgtgttatacagtaatcatatgtcaacgaaagcaccatcccaaaccccttataataatactgaaggagtttagacctctccattacaagatattgaagctccctctcgatatctgaatacaaaagaaacaaatactcaaggactggcacgtaacattttgtacatcttctctataaagctacagccgtatcatcaagcaatttaaagtagtcctctaagcaagcatataagggaataacttaaggataatgctagcaatatttaccttgattatgacactagcaaggatatccatgtcagttatcctaaaaacctcatgcgcttccaactcacttccaacttacttgtcgcttctaattcactcaaattcgcttctgaagcttgtttacttccaaaccgtagtagagaactgggttgccactcaagatgtgtcatcttagcgtcgaaaagaaggcaataaatgaagtagtctgatgttaaaaaagtatgatttacatatccctttgagcagttgcctgtgctctttcctactccctactatactacaccaccctatcacagacagtcgttttcgcccttctatccccgtccccatctcagccatccctgtagggaacatatacaccaaccatatcaaccactaatgtggatggcaagaaaagaccagcccttgaggaggattcagaaaaattcaatgactaatccgaatcccaagtggacaagaaatggtaggtccatcttgcatctcccttagtgaagattcaactaatccgcctatactatagagtcctactcagattgaataccacagtaccttcgagaataaagagaacaccctcgacgcctgtgtgggaaaaatagtcagcgaggcgccatctctatgctatgatactgagcagaaagaagcgttgcgtggatatcagaagcattgcactggcataatttcttttttggatgtcttcttattaagtttaagtatacgaagaagttaggttgaaggctacagattaatagcatgaaacagcttcatagtaacagactaggtgacctctaaataggtattctgattgagaatcgcggccagcagtggacatatggagtgtgtcgctgtgtaaatagtgtgtccgtagtccttgtttttgatgattgcattgaaggcaagtaatcctttacgcccaagacttcaacacgatgttaatttcagctcccctcgacgccaatagatcagacaaattaattcaaatccagcgcccatatactcccgaaccccgtgctggatggaggactagcagctgtgttctcggtcattgacggacatcaaatacagatagcaacctaggtctatattcataggctataactatgagcgattctcagccgcccgatgccgaaagaaaagaactcttcacgcaatgccactgcggtggagtctctttcgccattgccccacccagcgagaaattcgtcgtaagcccctaagtacgagaaagtggcttgcgagtatggatatctgcgaccgtcgattggttgctggcacacgcgtcatcagctgtcatccgttgagaatattaaacaaaaaaatcagaataagcgcggcctgacatccgatgtatgtatacatgtggctgtcaagaagataagctaaaagggcggatcaattatttccccggtctccattgatagagatgcttctccaactcccgaggctcgggttccctaggatctactctgtggtgttcaggtccaaggaactaaagtgagacaagctgtctaattgaatagtccgcactcgattcctcatccaagcattctcaatataaaagcccgctcgccttccctcaaattttccctccgcacccccccaaccccaccacgatgcagtccgtcccagaatcgcgacagcagtcgttcgaggagatctacggacctcccgagaacttcctcgagatagaagtgagttacttagcgcctaatacccaatatccactcccgaatcaatcacctaccccaataccccagagtctcgtgcccatatcttcccctaatcaagcccccatacatccccacccaaaacccgcatcaacaacccccatcgggcaccaagaacgaaaaatccagactaacaacgactgcaacaggtccgcaacccccagacccatggcacatcccgcaacatgtacacgtcgtacgagattgtgtgccggaccaacatccccgccttcaaattgaaacactccgtcgtgcgccgccgttactctgatttcgagtatttccgcgatatcctcgagcgcgaaagcacgcgtgtcacgatacccccactgccagggaaggttttcaccaaccggttcagcgacgacgtcatcgagcatcgccgcgaaggtctgcagcgcttcctccagatcgtcgccggacaccctcttctgcagacggggagtaaggtgcttgctagctacatacaaggtgggtttattctagtcacttgtgcggattgttgaacgtctgctaatctcatcttgcagatcccaactgggaccgcaatgcgtggtagatgactattgcgaccattaattcattaacgagaagcatgcctcattccctaggatgggataggccttccatttagcctcctcggactccctttttcacctttatttccagctccttcccttctccttcttctcccaatcctcacttcgcactttgatatcctgtccgcggctgacacctttcgtgattgaaaatgggtaccccgcagtgtatgctatgtgatgatcattgcttgattttttatgctcgtttgatatccgaatccaccgcttctttctccccactcagatacagatacaagcaagtacaggttttatttggcttaattggacaggcgctttttcctgatttttctttttccggcaatttaccaatattgttccatatgctctcatctttcgcgatgctatctttatgcatagtgagaataccagatttgttgcatcttttgctcctcagtgtcactttgattgtcaataaattcaaatttgaaaagagaacttttactaaatagggactgtagcaaaaacaaccgtgtacatactgtgggatatagatcaacaatgaaaacagatgaggaaaaaacaagaggcgatacagtaatgctccgcagagtacccaaagcaaatcaaaatgaaatgagaaagagaagcaaaaaagccaaaattcaaatgttcataacatgcgttggcaacatagcccatccaaggcttgtcccgattaggtcaattcatcccaaatcataggagcgagggtattatcttcccacggcgtctccaccgtggaagcagcacccgccccaggtccatcatccaaagagaaagaaagcgcaccggcagcagcaggcggaagatacatcgagtgctccgaaaagctctgcggaggcggaggcaagagcgcgggatcaatctggccaagactggactgcgaaggggtagcagcgtgacgactcctcgacgccgagttgcgagaagcggtagtcgaattcggagttggagttggcgtcatggcataggccttgcttggagattgttcggtgttgacaggatgtgggcggggggtcgacgcgcctgcagccgaatcctggccctggccctggtttgggttggtaaaggcctttccattcacagagccaccatcacgataggcgtgtgggaacttggttctaaagcggtcgcggaggtctgttgctttgcggtggcttaggttcaatcgggaatcttgctggattagagtccattggaagccgtgtacggcgtagcctttgaggagggcttcgtcttcgacggctgtgaagggtcgccgagagcgacgtttagattttacgacatttgcgggaattccaagagatgcgagggttgtctgggacttgctcgcgggagcgggtgtgctatttcccgatgagggcgactgcgattgggggatgctactactcccgggatctgtgtcgggcgtggatgagacggtactcgaagtagagggtttttgtggattgggagcctggccttctgctccagagattgactcggagccttgactcgagggcattatatgggagaggtggggtttgccgggtgtttcgtcagagccctctcctttggctttgagtagggtgttagcgagagtgtcatgtagttgtttcgcagcttcattgggatcggatgtactggagtaatattagctatcctagttgacttcagaggattgaattctaattgcttaccggtacgcccatggacataatactcggaatcttcatgacgaaactttagcataataccatacagttggccaataacaagcatacctgtcttttaaatttgaggcagttcgctgattaaactccagctccggttgagcaaggatagcagtccagttgccaatcccacatttgaccacaccccgaagtaaagtagccgtttcttcttcggtccactttctcacgtttttacgggaccggccacgagttttgggagaaattggcacatcctgtccagagtgaagtggcaatgccttagtgttcttgggatcctctgctttgcgaacagccagggcaatctcatcaggatccatggggttagtactttcaacattttcatcattatcattagggtcgtcgtcttcatccacattgagagacattctgaggatatcctcgagtctagtatctcgtctttcagcagcagactgtccatctgagatcgcgacatgagcagcaactagcgtcccagggtcaacagcagcaccgcctctggagggcttagtcaaaagctgggagatattagacccagcctcaataggtggaagcaaggcggcattaggtggaggctcattcaatccattcaggatagcaaatggcccaaatggaggaggtcgctgctccttctgggcctgggggataggtaactgtagatgctcgctgaacgaatcagcctgggggtctcggcgtcgacgcttgcgaggcccttggagggcgtcgtcatcgaaggatgacgagaatggaaacttttccagggcacgaagattcacaaaagcgggaaggattggccttgggggacgttccacattcgactgcgagtctgctgacagttcggttttcctgatgcgcgcagcgttcagaaactccgtaacggtcggcaggcctgcttttgcatttgctgggatcttcccgctattgctgtttgaattggggatattattcggctcccgtgtcccactggcattgggttcgaggggcgatgggacgcttaaggttcgtgatgatactggttctcgtagaggggcgatacggagagagagttgggggagttcgcggagtattgattcatcgaggggccgcaaagcgctcgcagattccattttggtcagctctcacagaattcatctcatcctggatctgacatatcatccatctttggggggtcagatgaagctctgataagatccatgcgataacggctaggctcggggcggtgacgggcgccagtaaagtgggtccgggaggtgtctacgtcagcttccatttttgtccaattgccgagatcccctggcaagggaaacgattccctttcgaaagatatcccattggactttctttcactcattgatttgatcggattctatcatacaattgaaattctatacttgatattggtcctggtcctagaacgtgagttgtcttcctctctatggaagtagcaagtaaagctaccgggagctttgtttatgccgacgctccaagcgaattacagctaggaccaaagcacgacaattgagaagacacaagggaataacattgaacgccacaggtcctaaaaatgcccaccatctttccactatggccacacatcctctttggcgtccttgagcctatctccctgtacgaccagcccaatcctttccttgaaatgcaagaatactactgacttactatccttaatgcagggccctcggtagtgcctaccctatctacaacctccaaggctttatcgccgggcaaacccccaacatcgcagccccggccaccctgcacccaagcagcgtcgcgctcgcctaccagctcggcaatgtctactcactcctcttcctagtcggcgtgggtgtctgccatgcgacaacggaaccaagggtactccgcaactatctaatcgggctggccatcgccgacattggtcatgtctacgccacgtacttggcgatgggctgggacgcatttgcggacgttgcggcatggaacgctttgacctggggtaacatcggggtcacgatgttcttgttcgtcaataggatcgcttatttcctgggcatttttggttatgcgaaggcgccgaaggcggctgcaaagcgggactgaggtgtgacctgctcctttggttggccagaccaatatgcactcgatcattttactatatctcaaaaaagcaaagaaagttaaggcggggtctttggctttggatcgctcccctccacactccactcccttgcgtttgcgccagactgctcgtctgcgcagtttaactttagccctactctttcctgtggcggctcttcggatggaatgggtctcatctgattcgtaggttcttggccggcgcatatgggatgaacatggttgggatgtggccgggtggatatgccggtatgcttgtatttgcttgactgggttactagtggggattgtggacgagatgggctgatccgattacgttttcagctccaatgagcatccactgttaaccagctgtagatagaaccttgaatgtgggaaaaaaaagaaaattatattcatattagcataatgcaacgccggactccccggtgctgccggatgctagcatgggtatcagaatagaaatacagatcataaaatattataggaggtcgtcatctggttgtagatcacctaccccgtgggaagactgccaaggaaaccaccccatcaatgcattagctgctgaccagagaggcaagcaatcgaaacagcccaccggtcataccacctgcagccacacaagccaagcacacaccgatgtcgattgctttacttctcttgtcggacccggacccggacccgaagaggaccatagcaggccgctgatccggtggtcacatctgtgggtctattaggtgctttgcaggtagtgaaaaaccggctgaaggactgcttcgccgttttctttgtggtcgcggaggtgggggaccagccagggaatgccggggaagttctggtagtgctggcgatagacggcgaagttgtcagccgggctcatgagagagacgatttcccgtggaatcagagcctcgagcgtaatcgggtttccttggatgttgccggggcgcgatgtcaagatggtatagatgtgcaggccttttatgatagccgtgaaagagtggtaatcacgggttgctaagaggaactgttcggatgatcatacggttagagggtgacatttgggcctcggcaagtttgggagtaaggactgctcacctgtgtgcattcctgtagatatggaatcaagtctgggagtgcggcgcagcattcccagactgaaacgcttagttcgcgccactggactttcagttgttccacgatgaaatcctctgttattaggctttgctgggttaactcggcaaattggtgctcgtccaggcctctcatgctgtcggccaagtctttcggagatgtcgactggagacaatcgtctaggaaaggaagagaggtgtcaaatggggtctgccaatccatgataggagtatggatatactgtcggcgatatcggattgttaaaacagtcaacattttgagcatggcagtaagccttcctggctggtccttgaataaggcctggatagggcctgcgatgaattcgaacccagcggtgttgggctgaggcaagtcatgatttgcgccaggtcgcacagctaggaggcacttgaccaacgctcggtgtgcgaatggactgcccgaccgaagatactataaaagtcagcacaggctctatgtaatgatgagtatagctgttagaatggacgaacgtaccttttccacttcggtatacagaggaatgtcctccggatagacgcccagatgatcctggagcataatataaagagccgcatgctgctgcaggaaccattcgacgaagacagcgttatacccgagagcagcacgtacaaactcttcaaatgggatctgcctgaattgaaaatggctctcggcctcaatcgctgcagcgattgcccgcgcatctagagtagggcttgactgtggtgggagccaactccaaggcatctcctggaaaggagatatactcgaccggcgcaggatctcctccaccctctgtatatgagaaagactcccaaggagctgggactcgtagggctcggacagtgcgctcaaaaaggtttctatggtgtcgacattccgagtgcaaagcgaagaccttgggaagtttgggtcgcaaaagagtccgaactggatcacacgcttgatttcttggatgtcgaatgcccagaacaccgttgtggcttcgtcttcccaccagcgataaggaatgaaaaaggcgggaatttccaggtcgagttggaagatcgccggataagaatggccccagtccgaggcaccaattctagattgcgcagacatgttcatttccttgaatagtgaatattgcatgtccaaggtctggggaggtggtccaaagaccgattcttctgggctggtcgattgcatttatgcggtttccaacgggacagaaaagcaagaccaacacattgggcacagtacacgctggacgctcatgtaacacggcgcttgaatagagtaattacagggcagggataccctggcgagcgatgtatgccaggcgcgacgcgggagagaagggagtgagtatgggagtactcgtatgtgtacgagaaataggaaaataactaaatagcgcacagataataaacaggcgggttgctcggaaaggtgaaggtgattggttttttcactataaggccagagccgatggacttctttatccctgttactcgttccgccacgttcgacacatcacgagggttgaaaatgagggggggggaactctgggcacgttaccaacaggggcgctgatctcagttcccagctgaaaggttccttgacgggaagaatcatcgggaaaaggggggaatattgtcattgggaagtaaatagggagggggcgagttactcaattcggatcccaggaccggacctccaggggctctagatcggggataaactagtgaactccataaaaaggaatgagatctgcaagttgggcctctctgctagttaccgagattgttacatgccgaacacccgttgaccgttgggctgcagaaaggaaacgatctgggtcagttaacaatatgacaagtggatagtctcccaaaggagttgcgaagcggtcaacctacaaaggaaggaaagatttaaaccgcaaaggctaattagtcggtcaaggggggtggatacacaaagtaatcaatgtgagtacactatgggatataaatgagagaaagataatctaaaacgagcattgggccaggccctcccaatgtacaccaaatggacgctaacgtaggctaacgtagtggccgtaatcccatgtgagtggagtcttgacgatcaaagaatatttttggaattcgacaaggaatatacgaacagaacaccgaacaccttggaacgtttgcttttcatggaagtccgcgccttggtttgtccgtcaatctagggccggagtatagaccatagaagcatcacaccaagctgggcggatttccaattcaggtaatcaggaacaagtattgaactttgtgacctgaagtggcggatcttttatcattattatatcattattgccatagccttgaatagaagcgccgattaacctttcgctctcgttcaattgaaaagaagatggccttgatatcggatccttgtgagattttagcacaacatactaggtacaccgctacacactgacccctccaaggtctgacatgatagcatctgaagcccagagtattggcatatatagcattcccactgccggtggaacaatccccactagttacatcacaagcgttggttctaagcaagatagttcactaccggcaggaagtccaatgtaagaaattctacgatgggtatattctccagtccaatcagtccccaacctcaccacgtgaaatcccaagattctcagacccagttcctcggaactgggacggatctcggtagacccacgccaaagtttgtggggagtgtcttataaaatggtgatgtccctgagtttcggggttcgtgagtctatgagtttctaagtttccgagtctaacttgagatctgattgatccaaggccccatctataataattagagcatatgcagggaatgctagagcgagccactagtactaataagttctaggctcaacgttcgcatttccgagaaaccacatgactagccacatatactactccgtatagcctcctactctatgcagcatggaccgacggactctacttccgtcgcctggtatcaccaacgatatatacaagctcgcctgattgattgcacattgaacaaaagtacacatttcaagtgggtccccacttaaggagaatccacaactgcattgtcctgcatcccccagataatacattgtgcgtcttgtgtagctcagattccaaattccatgacaaatgctaacatattagccagtacagccacccagccagccacccagaatgcatcaagccaagatcccccttaccacttggttaccacctcaccttgaccatttccttgaatccacccctacaaagcccaattgatcggtctccacggtgcataaattgacgggtcaggaatccatcctacagccacatgctgtgcatatttccagctggacggcgcttggaacacggatatattatcctccgtatcctcagtggagacgatccgaacgtggcacggccgactaccaggattgagtttggatctatctgattatcctattctctcactatgataagctgccggggaaatttaacagagagaatatacttccaatgactggatgcgcgagtcatttggctatctcagcccttgctttctttccctgcgatcactcgggaggatgtggtaggtgcgtccggattgaacggaacaagcgccgattctatgaggccattgctttccctcgagccgctccaacgtaagaacagcccatccggaagagaatgggaggattcctaatccgacaccggaaatgagtgagttattcttagactctcgacccgctctcgccattccttcagagatatattcagtacaacttagggagtgtcgatatatgtatgtacctaactttctccacaaatacccctgtcaaacccaaaaaatccatgtatagatgtactaaacaaaagaccaagttctacgcacggccggtggtagggcaaatctgcgataactccacatcgctgttgcatcgcatgagctagcgccacatgcgggacacacctcgattttcatcacggagcacatagttagcacgtgcatgtcaatccccatccaagtccatgatggccctgatcgccagtactgacctttgggggtgatgctcggtctgctatcgcgcgattcgggccaataataatgcgtgagcatgcgaattgaaacaccagtcgagaagatccagacttgagttttctgatcgccatcccagtatgtaagcaatctccgcgctcgtcttacgtgtaccatgtacaccgacacgggtccgacacgggaggaccgttgcatcggataagccgaggtgcggtgatgcgctggtgctgtggattgatcgattcgggctaacggggttgcgccggagatgagtatgtaggcaatatattcctgagcgggatgatgcatgtctcagatcttcagcttgaaacggtttgggcgggttcagccgagggtttatttgtaggaaatattggtccagacgagctggattggtgcaagtaggcttctcgccgtatggcatctgcggttccgatgcattcgcatgttgactacagattacagataggaaaggaaatttacgtgtccctggatcttcatgagccatggagaaaaaaaaaaagagcagatcatccagaaataggtggaagggttgaagatccagggaataaagtaaatacggtcattaaatattcgaaagatgtaatgtcaaatggtatcatatcactcggaaacgaagcggttaacccgttcctggtttgtttgctatggttcgaacctacgagaatgcattatcaaagcccgtcaagcaagacaagacgccgtttcccagctactgtttttgtttgtttttaagctgtcagctaatccacgatatcagaagatattgtgaatttagttggcgagctcgtgggcacggcggcggtcacgctcctcagcaatggagagctagaaaagaatgttagggtaattcaaagacacacagtattagggaatataacataccttgacacccttgcccttggggagggaaacccaaggcttctcctgtccaatgacgaagacgttggactcacgggtagcgaactggttgtcaagagcatcgcgaacgtggacgatgttgaaaccaccgtcgtgacgctcacggtgagtgatgacaccaacacgacccatgttgcgaccaccagtggccatgatgacaacaccggtatcgaacttgacgaagtcaaggatcttgccagtggcaatgtcgaccttgacggtgtcgttgaccttgatggcagggtcggggtagcggatgctgtagagagcaaacgcaagttagcaaaaccatgtcctgatctaatgggatcttactgtttccattgtcctctgccgatcaaccaaagcttggtccaacgactgaatgacacggaacttgtggagtgtggaactcacgttcgcgcatcgtgcgtaaccaagaatgggatcccgcccttgccgagctgaacacgcttgaccttgcagagcttgaactcagcctcctcagcctggatgcggtggacggtgaaacggcccttggtatcgtagatgagacggaagtgctcgccggtcttctcgagggagatgacgtccatgaatccagcggggtaggtggtgtcggtgcggaccttgccgtcaaccttgaccagacgctgcatcatgatggccttgacctcgcgaccgttcagggcgtacttgagactatcagcaaagagatgttagtgattgttcgtcgcgtgccgagatattcaaggtgtcgcgtgcgtaccggttacggatgaagacaatcagaggaaggcagtcccggagcttgtgaggaccgggggaggccttgggcgcataggttccggacattttgtccaagagccagtgcgagggcgcactgaggcgcttctggtgctttccgctgcaaaagacattcttgttagtgatggtgttccatttcgagaaatttttgatcactctcgcagggactggctgaactcgtaatccggcagatagacgagaccagtgtgctgaatagtgatgtagagggcgatctcatgatacttacgggccgcgcattttgactgatttgtcgactgaaggttgggtggtcggagtgtcgaaagagaaggctcaagccgagaagtggtgatccaaatcagagaggaattcgcttagtgtgtggtgattgtgagccctattctccactccgaccaatcagactccactagtgggattttagcacttgcttatgtcatctcagttcggggccctgatccacccgtggacacgtgaatttcctctttaggaatcaagaccaatgagatctaattcatttgtacgaaaatttgtatctatttgacatgcgctgataattccacttttccgtatccaatttaaatatagcccttgataacagcaacctcagcgttgaggatggatgacccagcagctccaatgacagtgttgtgagagagggcagcgaatcggatatcaaagtgaccgcctggggcaccctcacgaactcggccaacgctcactgtgtaaccgccgcagatgttgcggtccaggcggggctggggacggtcgggctcatcgaacaccttaattgcgggctctggtgcggaaggagcacccaacttctgggcctcggacttgtactcccgcagagcctccttgacctgctcggcggttggggtctgacggtctttgaaacgcaaggaaacgaatgccatgtggccgtcagtgacaccaacacgggtgcaagtggctccgatgcgaagaccagtctgctcgtcgaagccggtggcgttggcattcaatgaacccagaatcttttgggcttcgttctcgagcttgtcctcctcgccgctgatgtaggggatgacgttgtctaggatgtccatggtgggtacaccgggatagccagctccagagacggcctgctctgtgaaaacctcgacttcctcgacagggccaaacttggcctggagagctgcgaagggaatgacgatgccaataacagcgcagttagaattgcagaccaggaagcccttcttgagaccgaagtgctcgcgctggtgaggaatcagatccagatgttgggggttcacagtgggaaccaccaaaggcaccatggggtccttgcggaagttctttgcatttgagaaaacagggatctcagccttaatgaatgccatttctgcgtgaaatgtcagtgccgggtctatttgttaaatctgatacatctgatatcacataccggtctcgccagcaacatcgctgttcagtccagagaagacaaggtcacaatccgagaaatgttcaggcttgcagtcacgcatgaccaagttgctgagtttctcagacataggagaagcctgcttccaattcacggcatccttgtacttcttgttggctgaacgctcggaagcacccacggcctgaagctcaaggaatgggtggtctgccagcagtaggatgaagcgctggcccacggagccagtggcaccgagaacacctgtaacatgttagactgaacgatgcatggaatatcttgtaaaaatttgaggccgtaccgcacttcttctttgggaatgaaggagccattttgctcttgagtttttatatgaagacggatataaatcttgcgtaagttagcaaagaaaagttccaacaagtcgaaactagcgatcaatcaaaacatatatagaagaacaagggtttcatgtcgaatcatgacctgtatgagtcaaagcgttcccagagccccgcaggcagtatatacgaggctctgccggcttcaatacctcacagaccacatggctcagagtcgcaggggattttcataataaaatcttaatatgaaacactattgtacttaccgcttaacgggtgatgtggttgaaggcttgtaacatttcactccgacagcgatatcgctctcagccaattgccttgccccgcgattagtcagcagtctacatccggacaagtgtattgctccccgattggctgagatatatgggtctttggtcaaagtttaatgtccaagggtttggcttgtttgcattctttcttcggcctgtgatatggcaaatttcttgacccctactcaacgtcttcatataagattgtatcttggtgcttgggacatattcggcatcgaatagaatgacatctttatatgctatgagtcctgggttatttcgctctctccacttgatatcgatctcatatcactataataccgattttaaagcgactttcaaagggaagtagtagtaatatgatgatgcgatgtactccgtcttgaagttcctggagcccgcctttagaggtatattcttttgtaaggtgtataatgctaagtagtaatgctaaatcacaatcaatgccctgggcccggtgtctcgtcgtcgtagtcgaagatcttgccaggattcagcagccatttcggatccaatgagcgcttgatactgcgcatgacattaattgtgtccggtccaacttcctttttcaaagatcctttcttgcccagcccaatgccgtgctcgccctgtagtaccgaattagctgatattccggtctctccgatatgaacgacttaccgtgcaagagccctccatttctagcccacgatcgaccatgtcgtacactactttctcgacccgcgccctctcggcaggatcggtgcggtcatacataatgcttgcatggaagtttccatcgccgatgtggccaaggatactggcgaaaaggcctaggtcgaccaattctttcttagagatttctggcaggggtcagtatacatgcaatgaagtcaagattgaagaggccataccaatgatatcaggaagtcgagaaatgggcacagccacatcagtcgaccagacttctgatccctccttgcgcagcgccaacatactccacagcgactgcttccgcgctgaccacaggtcatgagcttcgcggtcatcacgagcgaattcaacagactgcgcattgttattcttggcgagcttcgtcgtcagatcgatgctatccgcgacaccggcgacagttcccgagaacttgaagaacagcgtaggagagaccttccattcacggcctgttccacccgcgcgattaataacgtccatttgaacatcatccatgatctccatgcactgcacagagacacccttccgaatgacctgcatagcagtcgaggccgcatcacgaatagtcgggaacgcgacaacgccaacgcgagtctgctctgggagcggggcgagcttcaacgtagcctcagtgacgataccaagcgtaccctcagagccaacaaacatgccggtgagattgtagccggcagaagtcttgcgcggacgtctgcgtgtcttgatgatgcggccatcagccaggacgaccgtgagattgatcacccagtccttcatagtgccgtagcggacggcgttggtgccactgcagtttgtgccaaccataccgccaatcatggcagatgggcctgggtcgacagggaaaaacatgccggtatccttaatcttctcgttcagatccatccattgaatggagggctgcacgacgatgtccatgtcgtctgggtggatttccaggatcttgttcatgaaggcgaagtcgattgtcatgccgccgagcggggcggagaaattggcttctagactcgatccgcccgagtagggaatcatgggcatgcggtatttgttgcatatcttggcgatctcggagacttcttgggtggtcttagggtatgcgattgcgaccggaagacggtcagcgtttaggctagaccattctgagaagccgtgttggtggagctcgtcttgctcggtgctgattgcgtcttcgccgagctttgttcttagctcattgatggcctggagtgttgttagtttgaatggccctggactggcgcgagattacgctgttgcaactcagtgatctaccttttcaaaatcctttactgagccatattgtggcttcttggaggtctgtgccggtgtctgggtatatgaggagacgccgtagcctaaccccgcagcaaatgcggagacgagtaaagccttggcgggggtccagaagggtgagggcggagcgttcgtagatgagcaattgctctcttttgtgtgctctgttttcccagcatcggaactgtttagtctagcaccgcgagctacaatagtgcgcgagacctggggccgacaaatcgaagccggtagccctcgtgagacccggaggactggtcgcattgtggacgactagaagatattatagaattgaaccttaggagctgttgtgaaaggggaagaaagaattcgatatgcgagcatgaggtgatcagccttttgtaccttgaccttgcacctcggacttcggccgagaaaagcagttagattggtccttcataatgccataatccactataatttcactctctggccatcttctcattaccgaagatgtggagaagagccgaacgtgggggcgaataggaacaggaacggagttgcgtgcgaagtccggtgagcggtatttgccgccaaatgttctgcctgcagtataataatcgtaaagtatttatactgaatcaaaaggtgaaggaagtctaatgctccatatccattcaaatgtcctcccgagggaataatggccgaaaaaactcacaaaaaggacacgatatagacattgagcaagtaattcaaaggttttgcgctacggaacaagcaataaagtccggcggtgagacaggcggtcagtatttactatgggatcatctactccgatgattctttcttttctatagctgcacttacatacatattgtactttgcatttacggtttgatcctctttcaagagtatatgtctgtctatgtatatgtagctaataagacattgaacggagagaggtagaaaattcaaggcgccaatggttgacggggcaaccgaggggtagaacctcgtacaccaacatcaactttagaattcagatcaatcgcgtactgtccaccaaatccacgaaactaacatctatgaaaattgtgaagcaatggcagagcaactcgctcaactagtgcgcgaggtagaacgcctaatcactacgccttacgtgccttcgttacaggtaagtcggtcgagactttcattaaagtatacatgctgataatactaggatctccatgatttagtgcagcacaccaaatcttcgacaattggcacctgggcattgtgtaaacgctgccaagttggcttgttggctgatgtcctgattgaagccttatcacggtcacgcgtcgcgctgcctctgatcactgcattcggtttgtgctggcttaatggaaggcttgttggaattcgactctgacatactatagcatctacatcatcgtcttttagggatgcgctgcttgagcgacatccggtgattttggatgccttcttagaaaaggccgtggacactaatggcgatgaggtaagcttcgttcttaggagccaacaaacggtagccgaagggcgtcaactaaccagttcagtatcttccggcatgtattgcgttattctcatcgcccctgccagcgagtgttgtaccgccagctaggattgccccattcatcacgaagcttgtcagcctgatggcagcgaatttatgtgttaaaactgtagcacctcttcacgcattcatctcaggactcaaaggctcgtcaagaatcttgaatgacattccgtccgaggtcatgtccaatctccagctggagttcaccaagacactgcgcaacctcgacgatcatatgggcaacttgttgtgtctggcaacctttgcgcaaattgcgacggcactagatacaaaatctcaaaatcaacacggatcagaaacgccatggctgctgagcattaagcatttctttggccagaaacggggcctgaaaacacttgacttggtcgtattgcgtgttatactagcttgctcatccagttgtaatctgacgccgtttgaggcgactgagagtattcggctggcgatctgcatagcggacgcaattgagcctgagcagaaacaggcttggatggcaggtaataatcccaagattgctaagctgtgcgagaaggctgtcagagacgttccctatagtcaaacgcaaaccatggttagtattggctgttcccgtcgagacgaaatactaatcactcaatgataggtaattgtcttcttgcacacacttctcccggcacattcattgccatctcagctacgggaagttggcatcaaggtccttttgtccaagaatagccaacagactatggagacgatacctcatcaactgattccacgcctcgcaaagtccttagcagtaagtataggagctcctgtccgtgtacaggttttgacagctgatatcaataggaatctggggaacatgccactcgtcaacttttggccttcaccttcgatgtcttaagaggtggtaaatgcgcgggggcagagatcccaacactacacctggcaaacttggtattagctggtgtacaagaagtacataccgatatcatgctttctaatgtcaagcattccatggtccctatgagggaagtgcttagagagacggttgactactttccccgacagccaagcgaaagtcaatgcagtggtcgagcatgttgtacatccgagctatacacaaggcaaaacaggttgttcctatctctattgggactttacaacatggcatcggcccaaaatggaagcgacattatcatgaaaacattcatcagacgagtggagcaatcaatgccgagcctcgactgtgccttttcaacaacaacccccaaaaccttccgtggctctttcgccttgcgcgacagacatgagcttccgtcaactcaagtgaaccgtaattggcgctctggagttactgagctgttcatgcagaatgcccagacctctcacgacaatatgatgagaaagatcgaggatacgtgctttgacctagaacgtcgctgtcacgacgttgaaggacccctgcgagctaccgaagaagagcgggacagatatgcgagcgaaaacgagcaactgaaaaggcaaaacgaagagttcaacgagcgactcaaaagcgaaaccacagagatggaaactaagttgcggaactcacatgacagttttgttgaacttggccacgaaaacacacgccttgaacaactccttcaaggtcaatactcatataccgaggagttgactatgtcgcttaactccgcacgcgaggagcttcaatatcagcaacaaagttccgagaatgcacttcacatcgaaaaagaaaaggcccgctcaaaggaattggagatgatagctactattactggaaaggatgatcaactggaagaccttcagcaggagctgtgcagtttgcaaatgaagaatgaggagacacgccagagtctagatcaaatgtcgagcgaaaaggccactttatctcaactctctagctccctcgagcaagagcttgctagtgctagagaggcattaaagcaggccaggcttcttgttgatgagaaagaagatcaagtgaaccgcttcgtggcccaagaggaagagttgcgaaagaaattgggatctgcggaaacaactgtgagtctttctgcagtcaccaatcaatacgaattggttatactgacccttctaggttgcgcaacagaatttggaagttgagaggctatactctgaattagaagaatccgatgaaaaatcgcggagtgagattgaaaaactgaaacatgatcttgaagctggagcttctcgggccacatctgaggtatgcctacataagcgtcaaatccgtgtatatgtgaaactaatctgtgccgaatagatagcaaagcatgagacagaaaatcggcgattgcatgctgctatgcaagctgccgctcttgatgcttctagggatgtccaatcgaaagacaaacggatccaacacctggagagaaaggtaatcattaccatctttatatgcaaaatctacacactctaacgtcaaatctaggtgcaagctttacgagacgaacgtgctgccaaggcccgtgagttctcagaggcacaacaacacattggtcgattaatgggtgtaatgggcttttccgctaatgcccctgagtcaaacgcgcctgcaaaacaccagcgaactaggtcctctgtcaacgccactccagctgcaaggatccctcaacccataagcgatgatgaagatggtatacagctggcacagtcctttgaatccataacatccagctttaatggacctaccccaaaacgaccaagagggaatcgcaaatcaacaaatcagccttatgctttgaacactacaggttcaaaggcgaaaagcccgcccccggctatcgccatatctcgctctgtgagaaagccactggcagaggctgaccgcaacagcccgaccaaatcacagccaagcagtggatcgaaacgcaatcaggtggatgactctttccaggagacacaggcccaagggaaccctgaagaaaaccggcttcacgatctggacttggatatggatcttgagttttctaaagactttctcttctcaagcactgcttttactgagtcaacggatcggattgccccgtagtgagaggcttgtccgggtagcgaagttgtgtgactagccctggaggtacctatgtcttgaataattatgatatctatcgtacatgttgcctaccgatgcgttattccttagagtgtttctacgtaagcaataacctacaccacagaccataatcgcctatatggtcttagtctatttttgcaccatttagaagtctgcgttatctaccactacccaaagacaattgtttgaatttgaaacttcagggaggtctcctttgttccttattcctttctatctcggattagggtgattcatttgcttgtacccttctttttatgtgttcttcacctttgccagtattgatgtatggacatagtacactattgctttcactacctcttcagctttctaaaggtagcaaataactcattttccactagaatatcactagggcattagaaggatttgaacacgccccgtaaagtagccatgtttaactagttggactatatgttcagtgaaggtattctcagtctcatatcacttttgagaaggagaaaagagcagcaatagtctcatttgtaagtctatattaaaacatctcatcttcgcttgactgaattcaaactgaacaactggactctcaaatgccatccctgctatgtcttttatccctcattttatagtcagttctcttggctccagggccgtgacaggttaagacggtcactttttcgtataaaacttgtttccgcgcgctccagtgttctatatgaactcttaggatatcgttatttacgcgtgttaatctttcggtttccgttagtcgctcatttcattcttagtcctcctttccgtttcttatttgtcccaatccttccttccgaccttggaagggtatataacgtaccctttcttctcctcttcttcaacttcttctgcttcttcgtaacacaccctactctcttgcctgacaaccaagcgcacaatggcaggccctgatatccccgacgtgcaacccccgaggtccaacccgccggactggggttggacgacctggagatcatggaggacctgtgcagtggacttgctgaatgtcccaagggaaatgaatacccacgacatctacgacactttcaacaagtacggcaatctgatctccattgatctctgggaggacacctcgggccggcctatttccaaggcacgcattcgtttcaagtaagcatcctgtcaatccatcatgctctttacatgctttttactgatcatctataggccacctccagatgaggatttctggagaaccggctccttcggggtgaagctacggagtggccgtgtcacagcgctagcgctgtgtgtctgctgcggtgattcgaacgggaccatccagagcccagtccgcccagatgttcagcttcccggtgaactggtgagtgcatgcatgacatgaagctatcttacaatactaatagttttttctttgaaggaactgaagaccgtacaagttgacatcggtgtcctgctaggtccatccaccatccattctatgcaaagctttaacaacctggcgtaccccagattcgttgtggatgtcatgcgcaagtgcttgtttctctacttcaaagtgggcattcgcggatcggagactgctgcagacgtcatacagcatgactatcgtgtcaaaatcacatttctccaactgtcccagatttaccaacagtacgacaaagccacgagagaacactcctttgttatcgtcctaggctccgccgccatttggcaccgaaaggccaaagagattcagtctacattgacagaaccgttgagctggagagaagaggatagttggtatcgccaaacctctgtgacacataacccgaacttgctaaagaatctccccacaaatttgaagaagacgggacatatcattgacttgggtaagtaccggtatctgttatgatattgtacgctaaccagtttttttaacaggacgatggaacgtattcaagatctcattcgcaccggatgtacatcccgatatgcgtcgtgtcgacgataccagtcactacttgatgcgcgttagagaaatcttcaaggattataacatcaacgtcaaagatggaagtcactttattgagaaagcagaccggccggtaccagtgtggcattgggttgactttttggagtccaagtctaacaaggcttccgcattgctgcaagatctaggagatcagaactatctacatcttcctttcaaggtgcggtatcaactagaggtttgcttgtcccagggatatctctctgaattcaccatgacccgcgaattcgtagagagattgaaggacctcggggatgaccaagctacaagactcttagagttcgttgcaactgagaaaaaacagtaccttgaggccatggaaatctttggtctcaaattcttcagaggagtgactgactcgaagattccgagctactgttgcttcatgcacacagcacgagtcaccccgactacaatttactacaataccccaactgtagacatctcaaatcgagtcgtccgcgaatggtctaccaaaggtgcacctgggcgctttcttcgagttcgatttacagacgaaagaaccgaaggtcgcatcaatgcttcactgagcgattccaacgatgagatctacacccgtgtcaaaaggacactggccaacggtatcactattggagaccgtcgctacgagttcctcgcatttgggaactcccaattccgcgagcatggcgcatacttctttgcaccagatgccggtatctcagcggggactatccgagcctggatgggtcaattcaaccatatccgaaatgtagccaaatacgccgcaagactagggcaatgcttttcaacaacccgagctttcaccggatcctccgttcaaactgttacatgcgatgaaattgttcgtaacgacttcacgttctcggatggtgttggaaagatttccaaattccttgcccagatggtcacatctcagcacaacattaaaaccctcacaggagaacctccttcggctttccagtttcgacttggaggggccaagggcatgcttgttatctctggagaccctctgcctcaggaggtacaccttcgaccaagtcagcaaaagttcgaaactaatcaagccggcttggagatcattcgctggtcccagtattctctcgcgactttaaatcgtcagttaattcttgtgctttctgctctgaatataccagatgaagtcttccacagtaagctcaacagcatgttgggtagcttccatcgagccatgcgcaatgattcgaaagcaattaaccttctccagaagtatgtcgacccaaaccagatgaccctcaccttggctcagatggtatctgatggcttccgacgaaatgaggagccgtttgccaataccatgctcgagctttggaagtcctggcatctgaagcatctcaaagagaaagcaaagattgccatagaccaaggagccaaccttctcggtgtcatagacgagaaaggtgttttgaagggctacttcaaaagcgcattgccgagcagaagagcctcttatgaagagagactggctgctcttcctgaaatcttcgtccagatttgccggttagatggagatggcgagtacgaagtcattgaaggtctctgcattctcgctcgaaacccttctcttcaccctggtgatattcgtgtggttcgagcagtgaaccgaccagaactgcaagcgcttcgggatgtggttgtgcttccccaaactggcgaccaggatattgcgagcatgtgctctgggggtgacctcgacggcgatgactacctcgttgtttgggaccccgatctgattcccacaaactggttcgtcgaatgcatggactacaagggttccaaagcgccagaccttgatcatgatgtgacagttgatgagatcacttcattctttgtcacctatatgaagaatgactgcctcccccgaatcgcacatgcgcacttggcttgggctgacagacttccgaggggcgtgtgggaagacaagtgcattcgtctcgcgcagcttcattccgacgcagttgactataacaagagcggtgcacatgcgagaatgacccgctctttggatcccaagttctggccccatttcatggaaaagcggttcaagagaccatccagcatttacaagtctaccaaaatcctcggtcaactgtacgatgcagtggtcactccggactttgttcccaagctagagaagcccttcgactctcgtatcctggaatccccgctggctgcagcaagtgagacctacatggaatacgcccgcgagctcaaggtggaattcgacatgaacatgcgacaaatcatggctcagtatgagatcaacaccgagtttgaggtgtggtcaacttttgtactccgccacggcttcgtgatcagagactacaagatgcaggaagacctaggtaggattgtgggtacactccgccgtggatttcgccaccagtgctatgacaaagtcggccgtcagggtggaaacattcccgccttggtcatcgccatgtatcgtgttactcaggagcaagtagccacggcgctggaggctcgacgcaaagaggcattgcagagagaggatatatccattgttgaagtgacctccaccgagctcccactcattagcttcccttggattttccccgacgtcctcggcgatgttgcgacgggccgggcgcgacaatctctagtcccagagggacaagggagcagcgattcagcaaatcctaacgatggcacaatcttcactcacaatcagatcctcaagattattgaagacatggatgaggaagtgaagctgaaggctaagaaaaacgtggagccgaaatctgaggagaataccaagccgaaggctgaggcgggctctggctccgcgccctcaaatcaagaacccattgctcgtcgacgtattgacaaatccgagcctaaccccaaccccgacgacgggaataaggaggtgtgcttcgacgaggatgatgagaaggagggaggcgtggaaatcgccgctgctgaggccggagagaagattcgaaagcaggctttgacagaggatatcgtggaaatggagggcgatgtgcagccttcagcacttgacattttgctcgacatgatgaacagctgatcgttcgctcttcgctctatgagacagaaaaaaaaaaaaaaaaaaagacggagaaaatcgaaaaaaacttacacaaaaaatgggacgcaggcgtggaattgcagaccagcgttgtaacttagttaggtgatgagctgcgagtctgcggtgcgaatgaaaccggacgctcgaatttcctccaatttttagaactaagcagcaaaataacaatagcctgtagggtatatccaggtcaaaactccaattgcttcaaagcactaccaatccaatccctcatccgccttctgttccaacaattcaacgacaggctccaacacagccttggtgtgtctccaattagcagcatctctggtcctcgagtagaagacagggcaatccaagctatcacaactaacctcatcaccaggagaaacgcccatacaagagcgacaaatagcttccagaccaacgactctcttttccgcctttcgcagccgcgaaacaacattaagcattgtaagatgcggcttctgcagacagttctcacacaccggaatagtagcattagacaatctcgaccgacaaataacacacgaagacgagcgcatataagactcaagagtcttcatgttaaccccagcagaattcgagagcgtcgatccttcaatgcgccgaatacgctgcaccttcggcatctcatcataccactgccgaacatttgcacccacaagattgaaaatcctctccagcggcggaataatgttcttcgtgatatagtactccgcatcgatctcgagatgcgcgtcatgcagaagcttctgcggcgcaacacagcggtcaataagtctcgcgccaggcgcaccggtgacaaccacgtacgggacgcgctcgccggtctgcggctcggaacgcggatcctccatcatgcgctttgtgctgatcatcgcgccggcaggcaggctgcgctcggagtacgtccccagtcggacttcgcgggcgaagcagaagtcttggatggagacgcggccttgcatgatctttgtgcattggcgctgaaagtaggattttacctgggagaggtctgcggtgcggaagagcatttttagggctttttcttcgattttttgttcggcaggtgtgccgtcgcgtcggacggtttcgatgccctttgcgtcgaattcgggctctttttgcgcccggtgctcgtatttgaagcctacgtagcgtttcttcgcgagcaggatgcacgggtgatagactttttcgaattttagtttgatcgggcgtgggttcaggtctgttactgcttcagcgatttcttcgccgatgtcgaaggcttggtcgcgtgtgcggcctttgaggtagatgaatagactatcggtgtcgccgtagacgacttccgcgccccagcgttcgattgagtggatgaaggcgatggctttttcgagggtttctcgtccggtctgtacgatgctatcggcgatctcggaacagggcattcgtccggagaatgaggcagatgtgtagccgtatgtgacgtttgcaatcagcttaagcgccagctgtctgttgttcagaagccgctgcaagaccttgtcgtctttgtctgccttcatgccgtttttgaccatcacgcgggtttcaagaatctcagaaagcatcttggccagcagcgactgacgcgcttcttgattcgcatacatcataccatttggtgcgatgttgatattgttcttcagtaactcgagcagcctgggctgtcgcttgtaatttaggaaccccatcttatctcgcccacgccagtgcattgctctgccaaggaaggttgagtagcagtagttgtacgcgatcatgacactcgggtacagtgactggaaatcaagtaccagaagtgggctagtgtagaagtcactttgtggttccatgaccaggggcaagcattctaatgcgttctgttgtccgacctgctttttgcttggtgagacgaggaggaagttctctggcttcgctattcggaacatcagagactcgactttgaactgggatccccgggaaatcacagaggcgaaatcaattcccagcaatctcgcttgctcgcttatccttgttgtcaattcatttgcctcgataatttccaaattcatttgcacacgagaggtgaaatattccactactttgaagagattgcgaggcttgccactttggtgccatcgcgtcaagtctttgggggaatagtgagggattcggcgatgcaagacatgaaagacaacgttctccatcgtgtactgtagcaggttgagctcgcttttcatggcgcgccagatgttaaatatgtgtcgcccagtgatacgaatggacgaggagtggttgaaaccccactgatctgcctctttcccaaatcgtccattggactgcgattttgtcctcgagagctcctcacatatgtcaaagtcatacttcttgcgcgctcgctcaatcacatatccccatgaagcgttgtggacctcgtagccggcgattatgtccggatcgtagtaacggacaatatctatgagtcgggttatcaggtccagttccgtgggctcacactcgacgtcaattgttaatgcctttgatattttggcttccggcctctcgccttcgccatggtaaaccatcccaacatggactcccgggagatgactattgacctcaaaatcctcgtcttcggattggatacaccagaacatgcaagtgatttcgtcctcctcggggttggccatgagtgttccgcgcgtgtttacatgcacttctaagctcattgtgctcatgtgctgagcttggtgttccacgctagtggacactgcatgctgtgagtatttgaagccatgtgcgttcttctgtgttgggccctcaatctgcgagagaaagacggatttcatcttagtaggtgtggcttgggctgcgcttagtttgaagtctttagaggcttctaactcttcaaaccactgtatgacttccgacctgcttggcgggacaggagcaaactcccagaccctggcggtacacttttctcggagttgccgatcaaccttttcttgctgttctcggtcgtgtgctgttggtatttgctcaccaaacattgcaggtgcctctgccgttgggtcgaaatttggtagatagtgaattgtgttgctccctagccgaaattctctgccgccatagtctctgggccgttcaggcacatccctttcgttcctgtaaaatgctttctggtatacaactgaaggacgcccatattcatttagtgttgaactgacttcgctagaagttgggctcgcaaatttgaagaaacgtaatgaggtgtttggtgtaaaattgaatgactgctgaatgtttttcatgttcttagcgagatgtggatctaaagagactggacccatcactgttgcagacgaatgtagctccgaagaactctgaatttcacttattccgcccgacaattccgtgccatatctagaagggagagaacttaagcgaggctggaatgactccggatcctttcttgcagaatttggctcatcttggctgtaccgcaaaatggtcgaaggatcattgggatccttgaccaccgggaatttcaggccgctagtataactatgcgcctttggacggggtgttctctgcgaggaagatgattttggttccgatgacggcgtttccgcgtaagaatccaaattgctatcaaaggagacacttttgtgtttgtcgtcttgctggtgcttccgcgtactgggtgattccaatggcccgccaggcaagccgtgtttggtcatgtgtctagctcttttggtagacgaataatggcaatcgagggtttcaaagtgttgtcttttgggtgttacactgctgctttgactctgattcctgggccgtctttcttgggctacacaatctccttccttgtagacaccatccatagttgtttctgtgttgtcagtctcagcaggctcttcgggtgcaaccaaatctgagaagcgtatttcgtcaaagacctcatcgtaaaagctctccttcagcgtgtcttctttcatttcagtctcctgtttcgttctcccttccaatgaggacccttcttgatcagaatccgagtaataccgtccgtcaggttgagatgatagagctagactctcatcaaccgaaatttccggcaccttttgctcggctgggtcctgagaacggctggtatcaaaggtcaaagtactgattttatcaggaaagaagtcctcaacactatccaacgcagtcttcacatttttggcttgggcgtcgatattcaagaatgtcccgaatgtcgtgtctttgttgtcatcatcgcgtttctcgttagcctcaagctcagacgccatctcacggaattcttcctcgtgtatccagccagctctcgactgatttcgtggatctgcagacattgaaaccaattcctcgggtccaaacggagtgcttccggggtcagtgatacccattctcttcttgcgtctgcgagtttcgtcctgccatagtccagccatgctagggacgagccgctcgctaaccgcgacaggtttcaacagctcggtgaaatcatggtgcaaaggccgttcctttacatcaagacggttcaggatatcttgaacacaaatatcaacctccagcgcgcaattgctttgtttctgtaatgcagggtgatcgagtatgctctcgggtggaactgaacgatcgtgccagcgatgggctagattgctgagctcgagatactcgggtactggagctcggaacttgacttggctacagttcatggttgcacatccgtacaagttgtagtcgcacatccattgcgggatgtattgcatatgtgcctcgtagggctgaagtgaacgtttcataacagctccctggtgcagaagatcgaccaggcgatttgtatggaaggggtttaagagataaattttgaagaaaaaccgccatcccacatggtatccgtagaacgggactcctttcaccaaggtgatgtgcgccacaaacgctgtcctccggtcatatgcatttcggcgaaagctgaccgccagagcatgatcgattgaaagatggatagatcggattgcggagtttactacagttttggtaagttaaccctcaaatcaccaatgactattactcaccatcttctggcgccaaagacccggtgtattcgatgtaaaggtatggaaatgcgccatggacatgtacgcaaactctctggcctgtctcggtggctccaaatattcgaatcacaggcaccttgggctgaaaatctgtctccgaggcttcatcacgaaaaggtagtggaggatccaactccgacgcggtcgcctggtaatgatcgatacagttgagacgcacacggaatggctccatcgctctggtgtgtggcgaccagaagccacagcaacattgcgaaggataaataaatcacgcaccgattatcgcatgtgtgtcctctttggcatctgtaggaatatgtggttgagaaaacgcgacatagatacgtccttgacaacgcgcgataacgcctagtcacgtgtttcatatcaaatccacccgccaagctcgggcctgtcgcaacttcactcatctcatctcacaacagagagagctacaggtggcttaatctacttcctcacttgctttcctttcttcccaggtccaattttacccctcctcgttgaacataccagtcatgtcacgaaaacccgcagatgtggcgtcaaaaacgcctaacgagtacattccgtccttcatctcgaaaaagccattctacgttgacgatgagacaaacaacgattacctcgaacatcaacgtcttcagaaagccattcccgatcaatcaaaatggtatgatcgaggaaagcgtgcgggtccagcagccaccaaataccgcaaaggcgcatgtgaaaactgtggcgcgatgacacacaaaaccaaagagtgtttgagtcgaccccgcaagcaaggcgccagatggacaggaaaggatattcaggcagatgaacttctccagaaggtcgacatggggtgggacgcgaaaagagatcggtggaatggctacgatgccaccgaatatcgccaggtggtcgaggaatatgaagagatggaggccatcaagcgaatggcgaaggatgattcaaagctcaagaaacttcaagccgatgaagatggcgatgaggcccccgattcagatatccggtacgccgaagaatccgacatgggacgacaacagagtaccgcaacccgaaacctacgtattcgagaagacaccgccaaatacctgctcaacctcgaccttgattccgccaaatacgacccgaagacacgccgaatggtggatatgggcgcgcaggatgaccaggccgctgcacttgtcgcagaagagaatttcgtccgtgcttcgggcgatgctgcggaattcgagaaagcccagcaatatgcgtgggagtcacaagagaagggtctgcctcaactacatatccaagccaatccgacatctggtgaagttcttcgtaagaaggagatggctgatagtgagactaagcgcgaggcgcatcgcaaagctctcctggataaatacggtggtgcagagcactcaaaaccaagtgcgctgcgagagacgatggtggttgaaaacgagcggttcattgaatatgacgagagtggtgccatcaagggtgcgcccaagaacgcaactaaatctaagtaccccgaagacgtgatggtcaacaatcatgcctccgtcttcggcagctggtggtaccaattcaaatgggggtatgcatgctgttattccacggtgaagaacagctactgtacaggggaagatggaaagaaggctttcgaggaagaaggcaacatgttaatgatggctggagcagtcgatgataatgaagaggtttccgaagacactggaaatgcggatctctctcacgagtctgagcaggccgatggcagggatgaagagcagctttcaaatcccaatggtaaaaagcggaccctggaagaattgaagtcaggtatcacagaggaggaatttgactcatacaagcggagtcggttggctgccgaggaccctatggcgaacttcatagggaaagattgattctgatgatgttctccatatactacttgcatgggcgttcggatgtactaaaatacccttgatatgctgttgaaacagtgaacaaatgcacaacgcaataatttgtgttttaaattttttttcgtatatagttctaaaacaacctcaaaataacatgcctcaatgagatatctagaatgaacatgaatcaataggatatcctatctaccactctgtaatttgttgactttcgatatgatggttatcacgtgatttgtaatgcacggaccgtctaattccaatgagggttggtcggtcacgggatccggttaagccctgataggttcacgtgattgactaacgcactcgcttagtgcacaatcgccagatcttgggcaagtttcgagacgcttagcgacgacgacccgacaaccagccccttcaacggaattgccaggtacgtccgcatactggtcccttgactagtgttcacttcaaccgcgtcaacttactaacacatatcctcatccacagttccataattcaagatgagtacgtccgatgccgactcatcgcaccgcgatcctccgcagcgtcgaataactccaaactaacaaccgccatagctaagggtacctcaagcttcggaaagcgtcacaacaagacgcacactctgtgccgtcgttgtggtacgtattacacctatttttcgcgatttcacccatccgacccgcagtcgcaaaatttctacatcgaaagacggaattagcgattacgccgaacaacacacaatctagcaaggacaagcgctaacctgtgatatttacgactacaggcaagcggtctttccacatccagaagtcgacttgtgccaactgcggctaccctgctgccaagacccgcaagtgtacgcaaatacccctcccgagaacgttgatgatatgaatggtggccattatttggaatttgggcaccaagtcgaaaactctggcttacatacattttctacgaacagtcaactggggtgagaaggctaagcgccgcaagaccaccggctccggccgcctgcgctccctccgcgatgtccaccgccgcttcttgaacggcttccagaccggtacccccaagggtgcccgtggccccgtcaccaactagattccctttttcgtccgctcggcgtcgcgttttcgttatcggagaggctggaataggaatgaggggagggatcctggcatgacgtgaattagcattacgggatagcattactcgaaatgcaatggcagttccggactcttatcgctttcccgtggagttggtggtgtgtgcaactgtcgatcacgttggttctctttgccacgtcaaggatgacaaagtaggacttgcagacgatgggaaaagtttcgttgaggggctctttcctacggaaaagagctggattaaaaaaaccccgggaaagcgtgaatgaatttcctttttcttcgtttatggctggcgaatatcccatgtcatgacagatacaatgtgaacactcttcctaccatttcatggtctgttctactcagtacgagcctctttgaggaccagacgcagagacttgaattggacatgattcaatggctgtttctgataagctcatgattctcgtgaacatctaacccatagtatacagcctcggctcatgattctccacgaccaaacacccggacaccgccatcccgttgaatgaagtacaacgcctctctctcctcgaggttctctttttcactcgtgttcagcccaccacctcggctgattctcagtacgccgctcacatcttttgcggctccagtatccaaagtgcgcagctgcatgaccgactgagcccgatgcgccagcccaataacaagtgccgcatgttccgtctccaatggtgtagccatcttcacatccgatgtggatgcattttgtattaatggggcatctgtagctaacgttaaaaccgtagcatgtgcactctgtcgaacatagtcagcctgccgtaaactttgcctatcaagtgacaagccttacctgttgtagcgctgtgatccactccgatatctctgttgctccaatccccatactcggacctgtcgcagcaaggagcaggtcaggctggtctataatgaggagaagctcatcaccatcttccattgaacttttttgctgttcaatcactgatgagatatctttctctagtgcgtccagggaggcgagaccacggccagagaattggagcttctttgcaatcccaggttcagccttcgtcgtcacatttcctctcactcctctagctgttggcaccggctgtggtgaccttccaggtacagcaccaggcggagaccgcattgggagcgttgtgcgtggacttcccagaccagccggtgagatactgggaggagtggatgtagcttgcggtgcgtaaaacagctcagacaagccatctatgaatgcaaactgttgcttatctgccagacgcgcaaggtcgaggccctataaccttggttagtgatgtcgaacaaagtatatatcaacacataatataagaagtagaacacaaatacatgttccaattcaactatcagtaaacctgttgtctgaacttaccaatcgctttgcttcggtcctccagaattcatagctccgcatgaagctcaccagcaccactttcttcttgataccattttgcggctcgtctgagccaaatgccacattgggatttggtgcgctcagcgcagcatgaaggaatctcagaaccagccagttcgaagtcgcaccaaggatagaagagaccagcgtcagagatgaatcaggcaaatttgatacatatgaggcgaggaggggcggtagtgggggttgagagggcatggttgcgcctcgatccggatatcgatgctatcctttgttcctagcgagttgaaggtgtaccgggctaaattccaatctttcctctccaattattcagtctttgtttgaaaatgttgctgctggtcaagtcgtggagatgatgtcgagaaaaaatgtctccggcttgtgattggcccctcaggtatagccatgccaagacataggatatcgagatgatattgcatagaatttaattctcgtgctgtttctcggtttaccttctcttggatatacgggtaatacatcatatagtctagtatttaactccctaaccatttactattcaaaacctctaagttagaggttctcagaatgatgcgtacaagcaatatatatagttctagctctatactacctcaacggctacacaaaacatctaaaacctcgaccgatgtagttcataggagacaaactacaaggaaaaccatatcagagttttgaaacaacataccaaaccgtcaacaagggccgtgatcagattctgaataatctctgcctgaggcaccaatatgagttttctgcaccatcacctgaccgttttccccaccatggaggggagcgatggatgcttcttatccatcgcattgcaagaggctgtgctctagcgccgatcgtgagtacattctatattctagagatcacttccccaccgctatgtgtatgcgcaccctagccctataatgcttatgtgctatactgatacccgatgtggaggtgttctcgcgaaccattttccgctcattatatcgaatgcactagctaactgttatagatgactgccgttgtatggcatcaaagcgcattggatacaagatataatatatctaacctgcctcgataaagatggctagcacgcgtgattcgcactcatttgctgtatgtattgatcggcctgcatgatagttgagataaaaagcaagggttgaagtctgactttccacatagtgcgacgaatgccgcttgcgcaagtcaagagtaagtgccttgtattaaacccctgcaggcgccggcccatttaacccgggtattatagtgctcaaaagagcggccagtttgtctgcaatgccgacagctgaacaaagaatgtgtatacagccctaaagtcagcagaagtcctctgactcggcagtacgtgaccagaaccaaaagttggtatttagacaaggctgactgactacccagacacttaacctatgttgaagatcgcctacactcatttgaaacagccttaggaaggctgttcccgggtggtgatctggatgctacacttcgttctcttttgcaaaatccggaggtcccgagggccccttcatccaagtcctcttcgaggcactcaacccccaagcatgagccagaacgggctgaaccagcaccagaagctctcccacagcaagccgatggctttgactgggctgaaaaagaaattacgcttggtgatttgacagacggcatggctgcgctgtctattaagcccgaaggagctggctactttggttagttgaatatccattatattaacttttcatttccaactgacacagatctcaggggcgtcttcaagtgttgtaccattacgagcactttttgatcatggatttgacctgaatatacccgtccgctcggcaaggtcgggaggcgtgcctctcaaagcacagcttctggaaagtgccccatccggactgatcgaacaagcgtttatcgacgctttcttcctcaactatcataccagctatccattcatccacgagcctaccttccggatgcagtttaatgacccatccctacgcccgcatggtacggcctggcatatcctcctaaacacgatcctagctcttggagcctggtgcatcggcgatgacagctcagacctcgatatcacattctaccaagaagccagaggatacttgcagcaggcgtctgtatttgagagtggaaatctgacattagtccaaggattattgttactgagcaactatgcacagaaacggaacaagccgaataccggatggaattatcttggtctggcagttcgaatggccatgagtttaggtcttcacaaggaattccctggctggaagatcagtcttctacaaagagaaatccgcagaagattgtggtggggagttttcatcttcgacagcggcgcagccaagaccttcggaagaccgatcctcctcccagaggacagtgtcatggatgcgaagcaggttcgaaatatccacgaagaggtatttggaaccaagatataacataaaaaaagtagcaataactaataattacaggccttgactcccacaacaacaactttgccggccgaatcggccggcccaaccatctactccggcttaattgcccaggccagattccaccttctcaccaatagcgtctaccaacgccttatctccagccccagcctcaccccagaagacacactaaacctgcaaaaacccatcgaagaatggtacaacggtcttccgtcttacctcaaacacccgcagttgcctatctccatgcagccagcgaatatagacccggactccctcgcactcgtgcgcaaccgcctgctatggcgaaactggaatctcacgattctgatctacagaccaatcgtacttcgctgggccgccagacgctgggccccacatagcggcagtccaggcacaccggacgcagggtccgaagaccccttcgaaacagagtgtcgattacgctgtcttcaaaatgcgcgtctgaccatctcctccatctcggagtacatggcgaactatatgtgcaccagacttggagcttggtacatgctgtatgtattcctcaaactaataccccagtcgaacgacatctaacataaaatagctacttcctcttccaagcaggcctcatccccatagtcttcctaatgaccgacccttcaaacccagaagccgccacctggctacaggacatcgaaaccacaaaatccctcctaacccacccctccctcggcacaaaccgcttcgcaagccgctgcttcgaggtcatcaaccgattgctcggcccaccaacgcactcagtgccaaacggactcccacccgacgatggccagctcgactcccagctccagcaccagcacatgtctccgcagttgcagccgaacatgatgccattccccgggcagctcttcaatgatcctgaattcggcgggagcttgtttccggtcgagcagcatatgcaaatgcctaatacgggggtcatggatttttcggaatgggtgaatttccccgcgacggaatgaatggctgtggttttgatattgatttcttttgtttgtatgtatcttgcattgtaggatgggcatatggagaaatgggaaaagacttggaaatagttatataggtatcagcgaatactccaatacatgactttgatagtgtatctaacgtggcatcctatgtcaagagtttcatctgtcagataatgggaatgtggttttttaacatgatatgtatgtaaataagtgtttatttcttttcccgggtcgttcaataaaccgacgatccttgacagggattccccgcaatatcaaactcacccacctcgggcccaccaaactcggggaaacgctttgtcccaggctcggctttccccctttcagttggagcggagtagacctctccgttgatcttcattctatcagaccatgtgcctcgatctaagctttcggagtactgtattccttcttcatctataccccagacggagtcctgtgttcctaaacagcagagggcagttcggttacttgacttggagtcatataccacgatataaagcccagcgacaattctttctcatctgttcagaaaatattgacatattatggctactactgcagatagcaccccgaagggtggctttgcgcttgtcctacagaatccctttctctgcggtgttgcatcggtaagtgtctgctcttgacatatcgctgttcattcattgaactttgcacagttctcgaccctaggtgggctgttatttggctatgaccaaggtgtcattagtggtgttatcaccatggagtcctttggagctcgatacccccgcgtcttcgcagaaagcggtttcaagggttggttcgtgtcaaccctgttgcttgcagcttgggctggttccttgatcaacggaccgatcgccgatcgagttgggcggaagatgtctattaatctggcagtggtggtctttgtcgttggttccgttattcaatgcgctgctatgagtgtcccgatgctattcgccggtcgagctattgctggcttggctgttggtcaattgaccatggttgtgccgctgtacatttctgaggtttctattccagagattcgcggtggacttgtggttctacagcaatgtaggttgttcttgaggttgggtatggctcgtcgactaatttgtgttcagtatctgtcactctcggaatcctgtttagctactggatcgactatggaacaaactacatcggtggtgctagatgcgctcctgaaatcccgtactccggtggtacaatttcaaagcctaccttcgacccatatcatgatgtccctgctggtggctgcactgggcagtccgaggcgtcgtggcgtctccccctggccctgcagattgtcccagctgtcatcctcggtgttgggatgctgttcttcccagactcgccccgttggttgttgatgaaggagcgtgatgacgactcgttgcacgcactctcaaggctgcgccgcatggatcgcgatagtcctattctccttaacgagtatcttgaaatcaaggcctctatcatgctggaaaattcctttgcgagggacaatttccctaatctctccggatacaagttgcacgttgctcaggtttgttgccaattcaccatatgaccggtttcgctgacactttcaaaagtacatgtccttcttcacagcatggtcccgcttcaggcggttggctattggttgtatcgtgatgttcttccagcagttcatgggttgcaatggtatgcatgtcccctcatcaatctatagtagtatctaattgatatagccatgatctactacgcacctacgatcttcgcccagcttggcctggatggaaacaccacctccctccttgctactggtgtttacggcatcgtcaactgtcttagtaccctccccgcgctcttcttcatcgacaaagtcggtcgtcgacccctgctcatggcaggcgctgcgggaacttgcatctcgctggtcattgtaggcggcatcctgggtggcttcggttcctcactcgtgaataataaatctgctggttgggctggtattgcctttatctacatctacgatatcaacttctcctattccttcggtgagatcatgccttgtacttttcccccgacaaccaactgacaacatcttcacatcagcccctatcggctgggttcttccttcggaaattttcaacctttcaattagatccaaggccatatccatcacaacctcggcaacatggatgtgcaacttgtaagtagcgcgatcaatcaggtattcgattcgaatctaacaactctgtcttgcagcatcattggccttgtcacgcctgatatgctcgagtctatcacctggggcacatacatcttctttgctgccttctgtcttcttgcgcttgcattcaccttcttctgcatccccgagacccgtggaaaggtatgttctgcaaccctcttttccagagcggaccgctttgtccatggaagattgacgatgctaactatttccaacagacactcgaagatatggatctcattttcggtgacacggccgctcacgaagaaaagaagcgcatcaagcgcattgaagccgagttacgcgggacaccgattgaagaagatgatatcgtcaagccggttggttcccatgtggaactggcatgaacgccaacgtcgactcaaagagaaggttacccgtacataatgatttattcgaagcaggacgtcaattgtaatacaaggaattgagataatgcgacattggcttcatggctccttcccaaactggaagttccccgtgtaaacaaagaaggcaaacaatatgaactggaaggtggcatgtgacattgatattgacagggcaggtgtgagggacctgtcgcacttgaggaaggcacgtgggtttggggtataaaaggacccttccccccatttctcttcttctcttcttcttctctcctccccatctctctggccaccatctctccgtccaccccccctcccctccccctccccttcccctcnnnnnnnnnnnnnnnnnnnnnnnnnnnnnnnnnnnnnnnnnnnnnnnnnnnnnnnnnnnnnnnnnnnnnnnnnnnnnnnnnnnnnnnnnnnnnnnnnnnnnnnnnnnnnnnnnnnnnnnnnnnnnnnnnnnnnnnnnnnnnnnnnnnnnnnnnnnnnnnnnnnnnnnnnnnctcatgctgcttaacctaccacagggatcataacattaccatgtttgttatgaggtctatgtaggtctgcatcaaataacaaaccgagctttctcgtggaagttcctgaagtcgtggctctcattgccatttgacaagtcccacggaatacatgtagatagccatagccgagttgaactcctagacttaatcctccacgtattctaatgtctcctttgtatcacagaatcttttgtgatgaggtcctcgcagatggttctaacacgacgccctcccaaacgcgtaaacaaaggtctctgtagccttgacttggtgctggccttctgttatgtctctactatctatcacatgccaaaaacaacaatgtgaatagaccttcgatgtcagccctgtggagaatggcgtcagtttggaatttctagcctattccgatctatcaccaagaccgggacttctattccaatatttgaaaaaaggaaatgttgagaatcgatcacaagatgcctctgagcgagtactggattgggtcaatgacaacggtgatatcgactctgtgcagcccatgtgaaacccatcttcactgccaaaaccaatacaacttgcgtgattatgcgcagattctccaggggaccactcacatccagatacagccaccaaagaacagctacctatcctcgagacacacgtcagctgctagaaatggtttctcaagagccatcaggtgcaaaaggcagcatctgacctgtccagcacaatgcaataaatactcgccctgctggcatcaaaccccagatcaatcttccattcttccagatatcccaaattccaagtccaaccatgccaccctcaccctccaccctcctccacatcggcatcctcctcctcgaaacaacccaactcctcgacctatccgccatagacctcctctacatgacaacccccgaatacctaaccacctgcacccccccacttcctcaatccctaatatcaatgagccgaccctgcaaaatgcactacataaccgccaacgccgcaaacccaacgcacacaacctcccaactctcaatccaaccaacctcatccctaacctcccccgccgtggcacccggaaccctagacctagtcctcatccccggcccatcgccgaaaaccatgccgccggcaaatgaatacctggactttgtgcgcgcgcatttcgaggccggcgtgctggtgttggcggtttgtacggcggcgtttgtggttgggtatgcgggtgttgcggatgggcgtagggttacggcgccgaggttgttggttcctgagatgaggaggatgtttcctggggcggactgggatgagagggttagggttgttagggatgggaatttatggacttgtggtatgttttttctttcttttttctttctttcgggttcgggttcgggtttgagttagatgtatatacatgtatgtgcatgctaatactactaggcggaatcaccaacggtcacgatctagtcatagcctacctgcgagaccattacccagccttattagtgaatacgatccttgccgctgcggatatcactccgcgtccggtggcgtatgctacttccgcgacggaggatacggataccgtctacgtggtgtggcgggttattaaggcattttcgaaagcagtggtttggttctttagtaagaagtgagtgttgaccttctagaagtgtggtagcattccaccgacgtcatcccgagtaccccgaggcttaaaatgaggatcgaggattaaggtttcttgtttcttttgggataaattaaataaaaactaaaatgtgacatctggtagtacgtagtactactattttgttgaaacgttattctacgtgtctaaagcgaggcacacagatatggttcaatagtagtgcatttcttgcagttccaaagcctaaaaaaatggagagaagaggagaacaaaaacaaacacagaccccaaggtttgcgaaaaacgaaggaagaaaaaaaaaaccaatcaatctgggcgagaacgctcgtaccatgcaacgcgctgcaccacgctaaagaggacaatcatagagaagagaagtgaagaggggaagtgaagaagagaagcgaagggaagtaaagaagaggaggaaaatatgaagcgtgcctaccctagacccagaagggaaaaaggtaagtttcatcagaataacttgagagcgatgtgctggcctagtccctgacaacccagaactataatacgagtcgagccaattaacccagatcattaagaaaaatgagacaacgtgatccactgctcttatcatgcatgacagcccggttttatcgtcgttcatgcggttcccaatggatcggttcaaagtcggaattctggaaatgggcttggttgtacggggaactaagagaaaagttagtattagtaatgaatgtggacctgaaagtgaaacttactttttgaaaggtggcgtgactggcaacgatcggctgagattcggcttcatcaccaacgggttcaggcggatctgcgggccgtctgacgttcgactgggcaatgaagtcatcggtggcggggcggaggacggtggcgccatatgtggagcaggggagacaggaaccgacgggatgggcgcgtgggttggcataggcgattgatacatgtcttgttgcggggacatgcggaatggactggcgggagttggcgagacagaaggcattggagacatgggaccacccatcccgaaagatgcgtcctgcatcaggttgggaatggccattaagctgggattgacgtcgaatccgagagcagcctggtcccaggaggagtagtcggacgtcatcccgtattggaggttgactatgggtgccatattcaaagtttcgaccgggtaaaggatatcataatggccgctgtggatgttaaacgtggtcaacacatgctgcctagagaaactcacggtcggtataggaggcggattgttgcaccactgggattatgagaggacagttggtggggtgtcacgacgtcgccttcacttcggtcgaggtaaaggatttcgactccaaatccggagccttcgattacaccgtcgatcagtgcctgcaggccaacttcgtcgatttcggtcttaaccgggtctatccgcgagctgcagtactgattgagtgacatgggtaggaaagcctggtaccggctcgggttgagcttcatccaggcactagtcaagatctgagagaatcagtttacgtcggagggaagggaatgacgcgcatcatccgagacatactcggaagtgggtaatgatagcatcagagcagtagccctcgttaaaagcctcgacgaggaaagactcgtcccgggcgccattctggatagcagcatgggtgcggttgaggacgtcctccgtagcatcgacaaagatctcgtagatagaatccgacagaccgacccgttccaaaagcgaagtaagagccttcattctctggatctcggtttcaatacggagcgtgtctctgagggtgaagagggtctcgaaataaccaaatgccacagctgtaaggattagcgaagatacacatgatatcgcatataaccatacctctccaaccacaattcccgtcgcctttcatgatccggcattcgggatgggtgatagaaagcgcctgggcaagttagacgagacatggtaacggctcaactcaagcttacattcgtctttgtagctagagtaggatccgcattcgagtaatccaaggcgatgctgtggctagactgttttattgagacaaggggaccctgtcgacacggtatcagccagggctgcagaggatagtcgaaaccaattacctggacttcgggctggtagttgttggacagcttctggaagcgctccatctcgtcggcggagagcgcattcatattggcggggtgagaggagactggatgggagaaagcagttgacagtgaaagcgctacaggcgagagaaacgacgagggaagggcgtcccggtaaaaattgacgggattctgcttttccgggaacggctggtgaataccgaaatgattccaggtaggttttgataacatcgcatacggtggagttgtgcttattcgagtcgaagagtgcgcagttatgccaatgttgtctgagggtgttagatgacagagaataaaataagagagaaaaaaaaaagtaagaaaataagatgacatacagctcgaatggacatttcctttggaagattcgggcgaaatacggcttcacacttttgcctcgtacgacagtgtgtcccagaatagcggatcggcttttactatcagagtctcagcatgacgatcagacgcaaaacatgcagagcagtcattgatgggtcgaatgtaatccacgagcacccgggggacgaataggaagatacaagaagtaagacgggacgggtcaagggaaggttgtactacaagccgctaggactcctgtgatgccaaagaagttttgtgatgaagagcccagaagcgtccgcttggaatatcaatcacatgggaaatcagagttccatgatgtcaggaggatcatgggccaagaggctataagcgaccctcttcaatgagggggtgcacgaaccacacgagtgagttttgacagggatggagctgagttgccagagcggatatggattccgggaaattataaatggaggagatggtccccagaatggaaataaggccgtgtgtatgacacacaatgacaaaagaaagagagcgatcgggggagttgcccacctttgagggtgcagatgagataatcacgggggggccacgaccgagtccgaaagatcgctggaagaacgctgaaagacggaaagagtagagaatcaacctctccaggccgagttggaggagttggaggaagaggagagatttagggggaagaagggagtttttgcggggacagaagagagagagaggaggataattggtgaatggcagttggccaaaaccaagtcggcgtggaatataaaaagaagaaaaataaaaagaagaaaagaagaaaagagagaaaacgaaaagaaaaaagaaaagaaaacaatgaagtaacatgcaccgcctacagaagagctgaacagctcgcgtaaacgccctggattttggattttaatttatgaagttgtacacaagttgtacagagttaggtatacacaaacgtatagatatagatactcgaataggaagaaacacatatccgtatatcgatatcttccctatctcaactacttcctaccctacgcctctgcacaacccttctactattgagtatcttaactatcaaatccctagtatcaccccccacttattatccacccaattgccgccggcgtcggactaatcggagctctatcattctccacggactcgcccaacgcatacataaaacagatatcaaacatataaaagaaataaaaaacccaagcgaaagggaaaaaaacgccaacaaacccgccagggtaaaagcaaaaggccccaaaagcggggtttgcgaaaatctccagggctgagagcgacggggataattcgttgggctcgtgattggtgcagcgccccgatttgatgcaacggccttttgcttttcctttctttttctcgtctcgttattttcggcgctgatggtggcattggcttttgtgttgtgttgtttttcttttttctttctatgtcatcctatcattttacccgagtcggtagttgtgttggttgtgccttgattcttgaactgcccatcacccgacctgccctcggacattctattctattctattcctaaacctatccctcaccctattccttgataggctattcgtatttctttgatgtgatttcagttcctaccggcccaggcgcagatagagctcatatgccggtagaaccaaattacatccaacgtcggacccgatctggagaatgaaagaaatcgggaactgcccgggacagaggccccatagctgatgcgcatctatcatgcaatcctataggagataaggaaatgtgttcacatgtctttggccgtacgtcgctttgcattttacctttctttgtatcggagtgttctttttccgattgtaatctcgccggttttatctgatgtatatatatttcggggcacatcctaggttgagttaaagcttcctacctacggtatactaccaagggatttagacttcaatatacaaggcagtattctacggatacctactagtactacacctaataccgaccctacatacactataaaacatacataaacataaacagttcatcttatcgtcattttagcgctgtcagaccaactctaaatagcggggctgattctcagtcctcaaccgaacaaagaaacggtgagttcttctctttctgttttccacgcggctcagccatatatgcacacgtggaaccaagggcgcttagagaccaaccgctggaaaaagcctagaacagccatttggtaggcatcttgcctcgcccgtccttgcgtgcacggggcgccgtgggtcgcataccctcgtctccaagactcgattggaaaatcgacccttgggagggttcgttcgcccgcagcccctcaccgttgagtgttgtttgccagagggtgcgcagcgcggagctccactctcccacagctcgcagccgctccacgtcactcgcactctccactaccaccgtcccattatcctggtcaatcttggcgttgagctttttgtccaggatgaggaaactgagaatgtccagcacctcgggcacggagaccttgatgtgtttggagataaattgcagcgaaaaccgcgtgtaaggcgcaatcaatttgaggaccgccttggtgcgcatgttgcggctcacctcgtcgatgttctccgcaatgaagggatcggccaggacgtcgggattcttgctcagcacgtcctcgtatgcatggatgtcgtctctttggaaggcgtccaccaggtcggtcatcgcggaaatccgggggtcattcttgtatggcttggtctcctgcgaatcgaacgggttgatgtcggacttcatcagcatggtcgtcaagacaaggtatttgagaacctggattcgttgcatagaacccgcctcgtcgtaattccggaacgactcgaaaaagtcactttgtgcctccttccagttctcttcgctcatgtgcatcttgcctccgcattcacggataatgcccatgatcttgggatgcggcacggccgaccgcactcggagagcgcgctcgtacaaggcctttagtcgtttgttattcttcgtctccgaggacatctggatctctagcgcgtaaagctcgagtaggtatgttcctttgctggtgtcgtccgacccgtcctctcgttgacacgcacggtgtaattcccgcatcttcttagccagctggccgtattgcttgcgctccagccacaggcgagctagtttaatatttgtcttcagccaaagccgctcgttgtttgtgttttggaacgattcgagggtcagcgagtagaactcctccatgcattgatacgcctctgcattatcggatcctttctcgataaagtcgagcatattgttgatcgatttctccgagtagtttcgtgtaacagcggatttgacgtatgtgagcagttcccggtagtgtgcgacggtctaaaagatggagtcagtatctgggcagctagatcagcgagatgagcttacatcgctgtatcgcccgagcttgaattccagcttgatagcctgctttagacctttgaatcccctatatcccatagttagcattgttgcgatcagcctagcagcagtaattaccagtcgcctttgtcttgttccatgggcgctatgcctaggaactcgtcgactgcctcttctggattgtcgaccttgatttgcttggcattgtagtatttgttctcaattccgatatcaccggaatcgtcgtcgtcggcgtcttcatattcaaagtcataactgtgattccggtcagctagtctggtaggtgaagtaaacaagggaccatactcctcatccgcagagtcctgcataaaatcatcatcgtcagacatcctaggcgtgtaatagtttgaaaacagcagaaggtggttaggatagagaggacaaagtggtggggttggagtgttggagaagctcggtcggataacagctgcgagcttccgccttgactatcgtgaggagagcactgacttggaattgtattcacggtgcattgactgtatgcgaacaatgtcgattcagtgtttgaataaacattgtccaaaaggtctatgctcattcaaagctaattttgaatggtttgtttcttattgttctactccatcgaatcagcctatctacggagtacctactccgtactgatggttcaagtgccaaacatacatacgcgagctattctaagcatacgaggcgtggctgataactcaggctatttacagcaaaaaggaaattaagagttccacctagatagttgtacttgttaccgtcaggggcttggtatgtgatttgtagtcctactagactctctacatgttgaaaacgaattgaatgtgagctttaacatagtaggaataggtccaagccaggaaaaaagcaagagaccctaagctgtatacaacttggtagtcttttaggtcgatcccttctagaaggtaggagtataacgctcaagatctaaaacactcaggaacatgcgcaaagaacccatacaatgtagtatgaaacagttataaaagatctagttaacagttaaatctcaaaataaaaaataaacctcggtggaccagaagggggctgatgccattcgccgatccttcagccttcagctcgatgtcattgacttagccagtcctggaatcttcccccgacaacaacctctctcttctactgtcacctaattcttccaactcctacgcgtaccacctcacacaccaaacgcacaatacgcggacgtactgtcccattaccccctcatctccttacttggagtctcctgaatcgctcggcaccatgcagctgtgcggccggcagaaggtggtccagcgcaagatggtgctgctgttagttttgatcggaatttccccgctaattattggcgactggtctgacattattccagaggcgatggtgcctgcggcaagacatcggcgctgaatgtgttcactcgtgggtgcgcaatctccccctcacccgtccccgatgatgacagcaatgctaatggactttgacaattagcttcttcccgacggtctagtaagaaatcctacttcttcggagcatactttaatgcaggttactgattctggttattgtctgtgctcagcgagcctacagtcttcggtatgcgcgcattcccccggagttgaatctcctgaacctgcagtgctaacctcggaggaatacagaaaactacgtccatggtacataataacctcactctactcctctgaccacgatcccagaaactcacatgccctagatatcttcgtcgacaacatacatgtggagctctcgctatgggataccgccggccaagaggagttcgatcgactgcgtgcgctgtcctacgaggacacacacgtgctcatgctctgcttcagcgtacgacaattccccctgtatatccccgcatataacctaacatgttccgatgactaggtcgacagccctgactccttcgagaacgtggcgtcgaagtggatcgccgagatcaacgagaactgcccgggcgtccccgtggtcctgaccgcactcaagtgcgatctacgcaaggacgaggacatgaacgacaaccccaataccatcagtttcgaccagggcctcgcgaaggcaaaggagatcggcgctgtgaaatacctgggtgagtgctcttcgatccatgtatattcgatccccggctcacattctttctagagtgctctgcggtccagaatcgcggtatcagagagagcttctacgaggctgccaaggttgctcttgctgttaacgcaggcagtggctcgtcctctggctcgtcttgtgtcattctgtgaggtgatgcattgcggtctgtttttgatacgcatggtattgctctatgtctgccatattggccttcgtttattcgctggatatctatcctgggaaggcctatttcttcgccatctgtttcttttttttctcgtttctcaccacgtttctccgtctctcccggttgggtttgttgattcccccatgcattaggtgttctgagcttgctttcgacttttttttttcttctccgggcagactatgtctgctccattcagacctcatagatatcggtctatgttgattgcatgattgcatagctctggatctccctgttccgagcatttcagcgaggtggttttttggctctcaattacgatacacaaatgtaatttttcttagattttgcagacttggtactttgttttctacagccgagctatcaaacagcatcgcacgcccaagcaacagaaacataaccctaccaacccaagcccgcatcatccaagcataggatcttaggataagccctatactagccgggtatcgttcatcaaatcctcctccgtaaccctataaacctcatcaatcccctcccccagcgaattcccagcaaaatccgcattaacccgcccaacaaacttctccacaaacgcatcagcaacatccccgatctccaatcccgaaacccccaccccctgcagactagtcgcctccctgccctccaggccacaagcgacaatctgcttaaagaaccacatcggctcatcggtaacattcagcccgacgccaaagctgctaatattgcgccgcagatgcacccccacagccgtgatcttcctcggctgctcatccgatcctgaccccgatcccggtccaggcttcacccacacgcccgggtcttccgtcgtaaacccatccaccccgtagctcttcagtaggtcaatgacgctgttctctaacacacggatgtggcaccgcggcgtgaggcccagtcgcttgaggtccaggatcgtgtatgcgaccatctggcccggcccgtggtaggttgtctgtccgccgcgcagggtcgggtggtactctgcctttgcgggatgcgtgccgtgcgggatgaagagggagcggatgggttctagcggtgcggggagggagaagttggggtctgttggggagggcgggcgtgtgtttgagggtgggaggtcgcggcggccggtggtgtagacggggtttggggtgaaggtgatgattgttgggtctgggggcgggggtggcgttttggatagggtggtgcttgggttgctcagctcttgggaggatattgagcctggggaggtgagctttttgtgtgcgaggagccgggttgtgagggcttgttggaggtgcgagacgcggctgaagggcgttgtgtgggggaggtggaggtgtgcgagtctcattttggtgcttttggtggtgagatgtggtgaggttttcggtatataaggatcgggtttctcagcgcattgtaggttggagaagagtttgcgttttccacggagtacgaggccggttgttgcggagaagctgtgagctcgctccgataaggtttgataagttcacatgccaatggcctctatattctctactatttcgtatcgacagctatttgtgttgataccacttctgtgtgcctactctaactgcaagcccaagccatttgttaagctaacaattttagaccaatcagcgcaaaggtaatcatacattggcgtagaatggtctaaatctaacagccaaatggtaccatgtactcgagtttggcaagagtagtgctaatgcggtaggattcataagtccattgctatacactcatcattcatccaaacggaaattagagtccaaactatgaagatgccacgccattgaccagctcagagttttgctcagcaggaagcagagcccagtcgcgcacgccacccttccaatccgcgatgcgaccctcggtaactcttacagtaacgagtcgcacatcagtgtcaatggaaacgctaggccgtctcgcgctaggatcctgttgctgctgctgctggccgaagagattgatctcctcctcctcgaaagtattattctccaaatgacgagccttacaccacgcttcctcctccgagccgggctccaagaaccgcgcctcgcccgtaatggtagtcgagatgctggacagcgcgctagtgttcaggttaagcagcaggctggcaagggaggagcgggtagcggcgggtggtggagagccgtcacggtcaccttgcgtcggggcccgggtgggggggcgatgcgacacccagtcgtggaccagcaatgagactcgcggattggacagcaagtggtttgttttccgcgatgcggggtttgtggtcatgatgatggtggggtgggggtcgtatggggtcgaggggagataggtgtaggacatcagtgagatgtggggtgttttatcatcacatgttgccaggtgcagcttgattgggcgatatgaggttagcttgatgggttatatgttgaacggtgttatacttacgaagcgggagttcttaaggcacgagacgacctcggatggcaacgaggtagcgacatggggatgagtggtggtggcagacgcctcataagacagcggggggttgagtgattcggccatgttagagatttgagaaccaaaaacggtaatcgtgaagttagagcctcgggagaagatcgagatctgcccaccgggcggtgtgcttaggcactgtttggccaacaacgtcatcacttcacgcctgtggatttccaacttccaggcagcttgcaggttccgctccgatttacggatattggttattctgtgcttatcattgggcacagcagagagcactaggccagtgtacacagagcagtatacaatcagtgtacaacatacactgattaggtgtgcaatagcgtggagacactagacaacgtcatagcggcagatatattggatcttattgttatatgatattacgctcgaatacaagaaaacgactgtccacagctctgtaatactcataataagtggcgatgtgcggagtacagtatgagtaggctatgtatccatgtacagatccctgcagaagtccaatagtatcgagtacatctcgccaatgtcatcattacccacatttagcgcgagatcagctgtaaaccgagccaagtggtaccaacgcccctcgtcacgattactcccctaccgaaaacttggggaagctccctccccgcacataagctgcaaccatttgaagtcaacgactcaacagcattgcgattgactcggtgattcacattgtaatcaattcgcagcaactgggacaggttaattctatagatattcagctaatattccctggctctcattactggtactggacatttccatactctccgatccgaaaggtactccgtacacatccacccgatcatcgcccccttcttcaactcctctccctgcaactccagcctgatccctgcacttacctctccactcttctatcccccctctttactttgtttctccatatctcccaccctaaacctcttctcccagctccctctatattgtacctagcttattgccaacgtcggattcattgtcgagctctcttctattgttctttccacataccatcatgttggctccacgcgcagcccgctcagcgcgatccgtgacttccctcttgcgacccttcagctcatcagctgtggcctatcgttctccctctattcgagatattacagcccagtcgactgaggagtacctcagacggcagaaggagttccgcgagaacttagaacaggctcgtttgagaagagaaaagcaagagagtcagtctgtcaatgcttctgcttctgcttcttcccccctccgtgagtacgctcccactgctccgcaagtgagcaatgcgagcagtcaagatagtgaccgccctactttcgatgctgccacgccacttgatcacaaaggcctaggctcactctcaacgcaccgctatctaggggatgaccagcaccacgaaggtctggctaaacgtggccctttgtcctcgctcatctacggcaccaaagagggccagcattttgacaaggatatggaacgctccttctcggaggtcctagcccgcggcaagtacgttcattctatcgtgatgcacgacgtgaagcccgacaaggtcgatgaatatgtggatctggtgggccagtggtaccctcgcatggcacgaaccgaggagaaccgtgtcaacctggtgggcagctggcggacgcaagtgggcgacaatgatacctttggtaaatcacgatcaaataagccaaccgttctgtgcgctgactctttccttgcttaattagtccacatctgggaataccaacgctacgaaggctaccacgactctcttcacagcatctcggaacacccagagttccgcgaatttgatggcaaactcaagagcctgattaagagcaagaagacttcattgatgcaggagttctcgttctggcccacgagcccgcctcgccgcctcggtggactgtttgagcttcggtcatacacactgcacccgggcaatcttctggagtgggagacacactggcgccgtggcctgaaagcccgtcgcgaagtgatggaaggtgtaggcgcatggttcgtgcaaatcggcgaattaaacacggttcaccacctgtggcagtttgccaacttagaggagcgcaagatctgccgcgagcagtcgtggagcgtccaaggctgggccgaaacggttcacaagactgttcccttgatccagaccatgaggagtcgcattcttgtccccatgccctggagccctgtcggttaaattgaaaaagctggaacgtttcctttggcctattccttggatcttggcgtccaggaatcttcattgtttgaatgagccgaattctgcgaggtgtatttcccgagattggtcctacctcatacccttatttatctaccgtcgggatgcatgtatagggaactaggccctttgcatcccatatgtgctgtgacctaggcattaagcgtcgaatccattagtcaagcatcaaacctctttcttaactatcagttagacccctttctccccgtattatttgagcacggatctcactctcagtcctgagcaaaggccctcggataaccccacttttgttcctgtcaacacttgaggcctttcattggcaacgcttgggacccttaggcagatatgttggttgaatatcgacctacgcgtcgattccgagccgacaagaaccgagggaataagtttgtagtcaaatccagcgtatatccatctcgaaactaatttaaggcctcatcacttctctccgccggcagaaaaaaaaagtcaacaaaatacccaagtggcctctttctctcttcaacgccgatctttaatatcaagcctccatagacccctgtctacggctgttcctccctaacggagacctttttttcttcctttcttcatcctctctttcttccctttgtttccattaccctttcccggcgataccttctccgatttccttcattatcacctctcggccctaaacgtgcgtctacgactctcaaaattgcctgaacagcacgtattggcaggcaccgacaactccaccaaatatatgcctcgaggtccgaaccgagtacccaaaaaatagatatccgcgcgttcaccgacgcgcaagacaaccgaaacaatggtgtacatccggcaacatgaattggcgaatctgaagaactacaaatatgctggagtcgaccactcgcctgtcagccggttgattctcaagccgttctacaacaaattcgtgattcgttgcttcccaatggggatggcgtgagtatttccctctccttacttttccccggactatgcatgcatggattatagatcctctggaggcctttttttgaataccgagacgaactatacgcaacgcaacatggaacatggctgactttattcttctttctgcgcgtctacagacccaatgccgtaagtcttgcccatgagacattgttacaattgccacgtataagaaaaatatcctaatctcgctcgcttcggtagatcaccctcaccggcttcatgtttgtggtaattaatttcgtcaccgtcatgtggtacaacccgaacttggatacggactgcccgccctgggtctatgccagttgtgcgattggcttgttcctgtaccagactttcgatgccgtagatggcatgcaggcgtatgtctacacttatcctgacagttgaggtgctttagatactgactgcgtttagacggagaaccagacagagtggcccgcttggcgaactctttgatcacagtgagttactgaatatagtacacaaaaggccaagttcatggattgctaattacttgtttctacgttactaggtgtcgatgcatgcaacaccggtctcagcgtcttggtcttcgcttcggcaatgaacatgggccagtcctggatgacctttatcgctctattcggatgtaagcccagccctgccctgcccttccacgcataaatagtctctgacaatcgtagcaacaatcaccttctatgttcagacatgggatgaatactacacgcaaatccttaccttgggcgtgatctctggccccgttgagggaatcctcacactttgcaccgtctacctattcaccgcttacatgggtggcggtagtttctggcaccagtccatgctggagaccatcggcgtgccgaagcctagcttcctctcaagccaggtgtacaacatgccgttcacgcagtggtaccttgtgtatggctccgttgtgctctgcttcgccatcggctcgagtatcatgcacgtcatgaaggtgcgtcgcgagcgaggccaggaccccttcacgccgctgtacggcctcctgcccttggtggccatctggagtcccatttttgcctacctatacctgcagccgatgattttggagaactacaccatccccttcggattgtttgtgagtctcgtcaatgcctactctgttggccgcattatcatcggccacctcactcagacgagtttcccctaccaaaacgtcctgctgtacccgctcgctctgggtgttttggacagcgcgggtgcgctgttcggcttgtggtccgcccctgtgcttgggtatggtgttgggcaggtggcattcgtgttcgggttattgggactggctgtcggtatatacggtagcttcgtggtatgtttccttcatgtttcccctccgcgcgacaatttgctgatcttgattttcttccagttcgacatcatcaccacgatatgcgactatgtcgatatctggtgcctcacgatcaagtaccccttcgtcgaggagaccgagcgcaagaccggtttgtcgaagaagaccaaataaagggatgtggcgcgattggcggcgcagtcgtgagtgtttcatgggcttgtggagaatggcaaagttcagtctctttcgccacaggcgaaacagctcaattgaggaggagtcgggtatccggattgagaagcgcgttggacaaatgatgcctggctaatgacttttccagtacatactttagtttcccttcggcacagagaagtagcttggagtggcgttatagcgatagaatatgagagttgtaatattgccgttcgtttcgagattgttgtagaagaaagtcgaagcacctgactgcctgccgcagcgagtccatgtctccactcgaaccagcgattgcgcgcgtgcttacctcagtagcttacctcatcagtctttcattggtggaaagttcgccgccttcccgaataaggacaagcgagggcacaaagcggcacaaagccctacctccacccaaaccggtccaaatcccttcagacttctcttagaagaccacctcatccgcatcacacaaggccatcgccatcagcgccatttaatcaactatctcgctgatcgactttcactcgtcaagatggtaagcccattttcgcccttttccgctcggtccctgttcgatgcgatacccacggacatggaagacccatacggattgtcgattcgaaaaattcaacgtccaccaacgctaacatgttgtcctcgataggttctcgcggtcgatctcctcaaccccaccccccaggccgaggcccgtaagcacaagcttaaggtatgaaccaaccgacccccgaaagaaacacgaaagaagaagtgaaaatatcaacccgacgaggggcgaaacctggatattcgacctggacctggacctccgatgctcaccatggagcaaatgggaaaggcaccgaacgacaggatgataatggaattcttctgggaaatggatatggaatccaatgttggatgaacaatgatggctgattattgaacttctctcgcctacagacccttgtgccctcgccccgctccttcttcatggacgtcaagtgccccggttgcttcaccatcactaccgtcttctcgcacgcccagaccgtcgtcatctgcgccggctgctcgaccgtcctctgccagcccacaggtggtaaggcccgtctgaccgagggctgctctttccgccgcaagtaaacgagaaacgaatgaaaaacttttttttcttgttatgttccggttgaaacgtcaaagagagaattagcatggagagaaattaggatgaaaataccaagacccggggttgacctcttaccttttttttgatcgtctcggcttcggttttcggtgtttcgggaagagagttgctattctggcccagttccatatactgggctttctctctttctctcttcctaccgggcttcaaaatgtcacataccaaacaacctttttttcaatatcacccttcccctaccgaaccacacggacatttttcttaactgttttttcgactggtgttgggttgtggggggatgcgattggcatatgatgtgatatggctctttttccatattatatcagtgtactggatcccctcttgaagaagacaaaatttgaatgtggccttttgggctcatttctcatcctatttccacccattgcttgttctttcttttgcatttcacggtgatgattaaaatctcagcgttgaattcttgttttctttgcgcgttatgacagatagaagatggagtgccccgaccctgtcaatgacccccacaaaagcattcaaaaaaaaagcaactagcattctgctaagggagttccggatatctggcacaaaaaggcaccttgcttgactttgtgctctgttttatgttctgattttctgctttcttgtgtttggtatattaaatgtatctgcgactactgtatatcgggttctacacctctatatcatgagttgtacctcacatggctgccaattgtagatgttatggttgtagcttacactgccagacattgtataccgttgtacggagtagttgtaccacatgatatccaatagcctctccgccgagactctaaggtgacctgtagactaaacgagagttgtaatacatacagatagtagctgtatcctccttaggatgtagttattgttgcccctcaggatgactgcgggtcccgggtgttccccaccttgcactgcgcttgtctgctttggtgtaggtttcaaagtgacgagaacgaattatactatactttgttgtcttgcctgatactctatctttttcgactatgcattttggctaaactttgtggaatctataccacctcaggaatgtatatgttatgggtgagaatccctgtcaagaatcgtctgcgaatagtttgatttcttgaaaaacgactcgggaaaagatataaacacttatttacatacatattatatcgaagaaccacagacgaaacttcatgaaattgcacttcaaggaattgacatattgccctgaagccaatgtcgctccttcctctgtgacagatgtaaataaagaaggcaaacaatgtaaactggaaggtgcgagggacggtgtcgcccttgaggaaggcaccgtttgttgagggtataaaagggtccctccccccatttctcttcttctcttctccttcttctcctccccatctctctggccaccatctcatcgtaacccccccccccccccccccccccccccgccagggccgcgagggtataaaaggacccttccccccatttctcttcttctcttcttcttctctcctccccatctctctggccaccatctctccgtccaccccccctccccttcccctccccttcccctccctccccctgagacagcgttgacagagggaaccgtagcacatgctgcttcacctaccacagggatcataacattaccattgttatgagatccatgtaggtctacatcagatatcaaacctggcgttctcgtggacgttcctgaggtcgtggctctcattgccatttgacaagtcccacggaatacatgaggggtgtaaatcttcgtagccgagttgaaatcctagacttagtctctccgcatattctaatgtcttgtttgtatcacagaatcgttcgcgctgaggtcctcgaaggcggttctaacacgacacgatccatcttgcatgcgcaaccaaaggcaccctcttttcctctgtacatattagaagagcaatactaaagcttaagagactgaacctctagtttgaaccaaggttgtatgtacatatggatatgtcatgatacgtttctgtttgtatcagaagcccctggacaagagttgccagtaatgaagagaagatagaaaatgaagaacaagtacagtaaagcccagcctagctcgtcatgatctccccatccccttgggtggatatatagaattaaataaaagactgagctttgaactcttactgaatcaaaatgagcgccttggccttgatctgggggccaaaatcaacagggttggaggggtcgccgccggtcagcatggccagctttccagtagtgtcgttgacgagtgtattagcaaacatattgcggccatcaatctcatctacagctaccttggcagcgttgtcacctgcagcgtacttgttggggtcaacagcctgcagccggttgtggctgttgcggacaaaatcgtacaagaagtagatagttgggtgccggttagggggattgcactgggggtgggcttcaaatgcactgttcaacttgttagcaacatatactactatatttctgcgtggtggggttgtagggtggggggaacatgctcaagtagagcctgcatcttggcattcatgtcttgaatattgatagtatcagacatgacggcgggttgtatatggtatttgtcagaatggaaggtagaattgagacctgaattggatgtttgctgatgtgacgaagctgtttacatttggaatttcctaaataggaccccgcactccgccttccccttccttatctcttatcggacttacatcggagaaaaaagagtccttttcttccaaggttctactctttcctcttctaatgtataaagcaaccctctgctctcagtctttaaaatccctcctactcaaacctacccaagcccacctcctagcaacaatggctcccaccaccccaacccctacctcaccgcggaaaccgctcaaactgctgatgctccacggctacacgcagtccggcaacatcttcaacttccgaagccgcgctctggtaaaacacctccaaaagtccctgcccctctacgaagtctccgccgcatacccaacaggccctatccgcctccagcccagcgagatcccaggctacgagccctccccagaagtcaacccagacgacgagatcgaagcctacggctggtggcggcactccaccagcgcgaccccgccgctgtatgccggcatcgaagaagggttcgcgaccgtagcgcgcacactgaaagaagagggccccttcgacggcgtgatcgggttctcgcagggcgcggcgctggccgctatggtcgcttcgctgctggagcctggccggaaggagtcgttcgagcacttttctaagataagcgatgaggggggcgcgggcatggatttccctgcgtcgttcgcggaggacgggttccagcatccgccgcttaagtttgcgatttcttactgtgggtttagggcgcctggggctcggtatagggctttctatgagccggcgattcagacgcctgtgttgcatgtgcttgggtctttggatgcgattgttgaggaggtgaggagccggggtttggttgaggcttgtgccggtgatccggacaagaatgggttggttgttttccatcctggtggtcacttcttgccgagtaagcggccgtatcttgatgctgctctgacttttattcgggatgaaatggatggtaatggcatcttctcgaagaagaatgaggccaaggaggtggaagaggatgtgaatgatatggatttgccattttgaggacagagcttgtacatatagacggagctagatttagattttttagaccatgcttacatgtagcacatatacacccctaccctaagaataaagacttgatgattggtactgtcatgagacagaaatttgctgtgtatgggtcatataaaggtcaatgctgcgacttcactactcatgggtctaccggcgaattattttacacgcggtggcagcaatccccgcgcccaagtcctccacattcatctcaacttaatgcgccttgcccatgtcactgcgagtgggctgaatacgggccatcatctcctccttggtgatcagatgatcgatccgctcgagcagacccagcagattcttcatgtcgctgctccactcgttcagaacgtcatcggcatcccggggtttggcaaagttgaccaatcgcgcgggtcggtcgatcttggcgtagatggtcttcgatgtgaccagatcactaatgtacttctccgtctcttcctcagtcagatccagaagctgggtcagacggcccatctgaatgcgagtgtagtacttggccactacacggacattgtgctcaatgacacgcttccgcaggtcttgccacctctggtttgcttggttctccgtagactgctttggctcggcgtcgaacacgtctgtgctgcatagatgggggccgaactgctcggcgaccataggccagcgcatcagctcggggatggtgaacagcttcaacaagcgggattcctcggggacttgtgacagccgtgagtcttgcttgatgcggtgcaggaggtcggattgttcattatcatagggagacaggacgacgtagtacacaatgcgggcgagtgactatagttgggttagtggcaatctaaattttgagataggtaagtttacttacggcacgcagctgctctgggttgttctcgactgcttccgtgtccaggacttcccggtagttcttgcaaacctcgagatatttgctatcgtggttggccaagataatctgctgttcgaagtaacgaagtttgagatctgtgacgtcgtcatccacctctatgggtgcctcatcaggcccacgggtcttctctcgctcctctgcctccttcttgagcgtctcgatctgctcagccgacctcttcggcttgcggttgaagtaccgcttgttgatcttgcggctgagaatctgggcctgggtccagtctccgcgctcaatgcacaaagagacctgctccagaatgaattctgtcttttcccgtctcgtcattgacccaaatgtttccacctgcaactcacacaggatgtctgctgccgaagtgagatcaccttgggtcttcttgatatttgaaagtatgcgggtaacacgggctcgctctacttcaacaaagatctttgcgataattagcatcactttggtcaagatcaatggttctcagcgtacctttccctcagtcactgtgcgcagagtttcgataacagacaacttgacctccaggctgggtgtgtcatccaggaatgtcatcaccgtctgcaccatcttcgttgtggcctgcttgagttgggcatgtttcttagataggagcagcacttggtcgttcagaaggttccagtcgccggagttcttgctgatggtgacaatggcaatcaggagtcgcgatgtagtggcaagatcggatgcctgaataagagaatcttgattagtttgggtaggggagtaatggggtggcactcggcgtcatacctgtctggattgcttctccaaacccagcagcttatcgactgctccctggacatcggtctagaaccatatacgttagcatcaactttgatatggatatcatgtccgggtgtacctttgcgagatcttctgcctccgggatgagcttgtcggcatccttggtgaagtccttctcgggcttcagcaggccggacatgatgacgaatgaggctggagggccggtgaatcaatttaaaatattaataggttagttgataggaaatttctttaagcaggtttgttgcgcttgacaacgtgagattcgcggaatgaaagaggatgatggagatgatgcttgtagctccggtgttgcgcccttacgagctggaagctccgtcccacgtgaccgaaacatcgccttccactctgtctggagtacttgcagttgtcctctcgtctagcacttgggaacatcccagctagtatattccagtctgttatggatacatatataactggtaatttaagccagagctaatgatctatatgttgttctctgatccatgtttcctgttcaacgaagttaaacatgccatagcgaccaatagaagaggctctaaaccgaattttaagaccatctaaccaaccgtcagaagcctctacagctataaataataatttcactataaatcgtataaatctacattgtacctggctgcagcgggatatgattgtgcgtggcctttggatcatggatcgtggtgatttcccaaggtcaccctatgcctactcgggctatacctaggtaggactagtgtcaaatcatatcccgaactacatccagacacatgtatgagcgactgaagagcgacagaagagcgattggattaaacaatagaataggaggtacactatcactgttttcatggagcaagagtttgcccatattgttctcaagagggggtttcgactcgttacatgcgacttgacatttatgtgcacgtcaggctacatactgcgtgagggtagccatatcacaaactgtacattagttgtatgaggaaatacgtctgaaaagacaccattctgttatccttagatttgatgtcctcaatcttattttgagccaaatgcgttagatttccaagtcctacgtcgtcaagaaagaggcatatgcagttaaagaccacgcacatctcttactcgtgtactcccactaaactactttaggtaagtctccctgcacttccccggcatttggagtcacgtggtgacaagcacgcaattgcctttaaccgttttaggcaataaagatgtatagaaatttttagaaagagttgtgcgtctgctatatatgagtcaatggtataagttcgacctcaaggacccttttctgactcttgatcacctttacaaatcctagggcttcctccaggactgtcaattgtgccaggatcatcccccacttcgataatccttatcgcccgttatcaccaatagtgacaggccttttactcagttttgatattcgtcgctttctccgcggaagtctagaaatcacttcattggtcggtctttttgttaaatacaagcttcaattctcttggaccctcggaactccagatccttccgcaattcggtctcgattacctctctcaaaccagcatacctcttactagatttattggcggggcttgacatttcgttctactgtacttcaccatgaaggatgcctcatgcgatcctagtccaaccgcgccatttatggttgcgtggaataccgactcacaagtccacttgattgtcggttcaaattctcttgccgccgctcgatgtgcgaggagcctcgaggtcggcgcaaagccgatcatcattgcgccggagaccgatgacatgcatttcacactatctgaacatattgccaatggctctgcccagtgggttcgtcatggattccaagacgaggacttgacaaccctgggcagagaagaagttgatcacgttgtcgacttggtctttgtcactttgggtagcaacaacccattaagtatgacctgcttgttcaattcacaaaccactcttactcacatttcctactaggttcacacatatcgaagctctgccggcgcctcagaatcccagtgaacatatcagatgcccccgaactatgctccttcaccctactctccacctattcagacggcccccttcacattggaatcactacttccggccgggggtgcaagcttgcatccaggctgcggagggaaattgctgccttcctaccccagaatcttggaacggccatcgacagacttggtgctgtgcggagacggctgtgggaggaggacaatgccgctgggctcgtagaaaatatattcgacagagaggacgacgatagtacaggccaaaagcacaccttcaacaacttggtcacagaagacgatgctgccgctgcaaagacaagaagggtgcgctggctgtcccagatctgtgaatactggcctctccgaaagctagtatctatcaccgatgccgatatggatgccatcctgaaggcctatacatctggcaatgccaccataaatgacacaaacggcgtcgataccccctcaaagaaggggaaaatcgtcctcgcaggctctggtcccggtcacccagacctactcactcgcgctacctactacgcaatccacaatgccgacatcatcctcgcagacaagctcgtccccgcgccagtcctggacttgattcctcgccgaacggaagtccacatcgcacgcaagttccccggcaacgcagaccaagcgcaggaagaattcctcatgatgggtctagcagctttgaagcagggacggcaagtccttcgcctgaaacagggagacccatacctatatggacgcggagcagaagagttcgagtttttcaggaaggagggctattctccggtagtgctaccgggaatcaccagcgccatgagcgcatccctcttcgccgatatcccagcaacccaccgcggcgtttccgaccaggttctcgtatgtacaggaaccggcagaaagggggctgctcctaaccctcccacctacgtacctactcagactgtggtcttcctcatggctcttcaccgactttctgctcttgtcgagtccctcactaccttccccgcagaagacgctggttcccagtcccgcaaactctggcccaaggagacaccctgtgcgattgtcgaacgggcatcgtgtccagatcaacgtgttattcgctcgaccttggagcacgtatgcttggcctttgaagaggcagggtcacgaccaccggggttgctggtcgttggtgccagttgccacgtgctgcacaatccccaaggccagcgatgggtgattgaagagggcttccatggactggatgatatccgcaatgaagtggctgcgcaagtggacgccgtcgctgtgtccgtgaacgagaagcagtgattcaaaattttcttttatatatatttccgagcgacggttgcatgtacatagacagcattcagatacccctagaaacgagatatgcatgatcattgaagagtatcattatttgagaccaattagtattttgaaacacgtagattaatgttgtataaaatgtacacctattttatactacgtggaagaaaagaacagggtgaggctaaaaatagtggaaccccggcccggcgacgttgatcactccacctcattcacatcttcaattctgacaaccaccctctgccgcaaccatgtcggccaaagccccaaagccagtctatttctccaacggggaggctctccagaggtgattttctcccttttctgcgactagatacccaaatcgctgaccagtgtgcccacagccccccgctcaccgtgcgacttacccgctttgtcgagagcatttacttcttcctcggcctgtacttcactactctgttctcggtaggtacctcttacaggcgtgattatatgcgacatattgttttcaccttgcttctcgtttcagcctgcctctctttcatatcccgcaactggactaatctgacatatcctagctcgactcatacgccgctgccgagagctcctctttcaacatcaaaaaccagggaaacaagtatactactcgccctcgctgggggggtggcacaacctcattcggtggaggtggtggtggaggaggtggcggcggtggtccgggatttggtccgcggcgcgtgggacgtgtggatgatgttcgtggaccggagtgcaagagctgccaataagcgaacagtcaacgcgattgaatcgccgcttcaatatagcgtcgaggagagaaaagaagttaatggaccaagatctccggtgccagggtccttcgttttgtcgtctttttggccaggaagcttgtgatatgcgactgtaatgcacttttgatattcagcggaactttgtactatgctacaacaaccttcgaaatacatatactacgggctaatgctggtctattgaacttgatacatcaccggaacttaccgaaactgatagctcaagacaccccttagcgccacaacaccgcctcttcaaggtcacattctgtcaacgggtcgtcatgatgattatagaagcgccacgtgacagtctatgctaaccttggaagtgtagtaggagacttgaaacacatttccggagggaatccctaaacctagcatgcgacgtgctatccagcccaaggaatactacacaaaccacccagcatgagcgccatcccatcaacagacgccgaatgggcgcaaaagatagccaatatgaaggagaaactgccgaaaccctcgctgtcccagccgccaattccaacacaaatcaaccgcacaatagaccacaccctccaggtgagcccagttgaagacgcacagatcgacgcgctgtgtcaagaagcccttaaatacgaattcgccgccgtgtgcgtgcgacccgagcacgtcgcccgcgcagcaagccacgtcaaaggcagcaacacagcggtcgcatgcatagtgggcttcccggaggacgcgcacaagacagccgacaaagtacgcgacgccaaagaggccgttgcgcagggcgccaccgagctcgacatagtgatccggtacaacctgctcaaagagggccggtacacggaggtatacacggacatctatgcggtgcgtcaggctgcaccgtcgccaatcgtcctccaggcgattctggaggcgtcgacgcttgagagggatcagcttatcgatgcgacgatcgtgtcgtgtatggctggtgcagactttatcaagactagcacgggccgggatggcggtacgagtactgagcatgttaagctaatgcactatgcggcggagatgtgtgggtgctcttgcaggatcaaggctagtggcggtatacacaatgctctgactctgttacgcatgcttaaggctggagcatatcgcattggaactactgacggggttaagatcatgatggagatcgatgagggggagattcttgaacaaggatctggccatgcggtggcttgaatctttctgagtttctcggggtgcgtgtctttgacgttatcaggttaatttttttatgtttggcagtgctctatgcttccctgaatccaacagggcgacaatccttactgttctgcttgggacccaatatctctgtatgtagtatgtagttgtgaatagatcgaccccctgcgtatagacccaacgggagggaccggcgcgagaagcgggaaaggaacctagatgatatacgctcaaggattgagaccttgctaaagctcgattgccatagagatgcgcccttggtaaacaagagaagagaagcttgcagagcttctgtgagacaattgtacccacccttgcgcatcttgccatgagagccctgcaagccctgcattacccctttggggttgcctcgcgaacaccctgaccgaaaatgagaccatcccctcctaaggtatttatctcatcttgtagatgtgaaaccctgttttcagaaccagatgattattgaaacagcatacgaagtagctcgtaaaaagttggacataaggctaagctgctgcccaatgaaaagaacacacttagggttaaggctcatacattcaaagacatggatgagaaccgtttcaaggggatgcgacaaaaaatttgggtaatgaattgcactcatatgcaaagttacgaacgtggcggacatttattattgacctgaaagctcccaaatgatatagtatatactaatccaaaaccctgcgccgatccattgacatgccaatcaaaaatccaaggctttttttattcgtcgctctgatcatccgagtcactggtcacagcaccatcaatgtccatcttttgaatgactgcatcaccattgcgacccttcttctcggcagcgagccaagcttcccgtttcttcgtctcgtgttcctgcttccttgcttgccgcaggaccttctcctgttgtgcggcctcctgcttctcatgcagctcattgacataatcctgcagattgtcgagctccgagcgcagctgtacaacctcatcatccgcattatggcgagcagtctcattcaccgcaaccttcttcttaagcacagacacctcgttttctagctcggcgacctgcgaatcgcgggctgctgtgtcttccagggtccccccggccggcgcggtgcttgaggcaacgcgggtaaattccgtattggcaggctggcggaatgccgcgagctctgcaagaccatcctcgagcatggagatggggaaagaggagtgagtaagcgcctgagaaaattgtgttggtttgcgggagtcggatggtgcgatgatctgcgtgtggaacatatattctgcggggacggcgccaggggcatgattcgcagccgaatggccactatcatggcgcggcttgacaatagtgtgggccttcctcttcaaatccgaagaaggatgagggatcccacccggaggcagcatgatcaagttagtgatcgggtgcgtgtagtcggcaactgatgatgtgtacttccgtcgagcgacattccaggaaagcaccttgccattcgcgtggcccgagagtaacgtggttccatcatatgtaagggagactgtcttcacggagcctgtttcagccgagggagggagccaccggtcctccatggacacctgcgcgggtgttgattgtaatgaaggatcgtgaagaggatgctgcgcagattggctccggtagaagtctacggattgaatgctgccgtcttcatatcccacgtagaaagcccggtcgaccgggtctagagctacagatgttgcggataagggaaggaggaaggttctcagtgcacgaccggtatgatagtcccacgcgatagcagtgttgtcctttgcggttgataccacgatgttatggcggccattgctatgtcctatagccagggaggtgatacctgcgcggtggttggagaaagttcggattggcgaattcgtgggttggcgagtcgcgctgagagcgggtttcgagaacgagagaatgccaggcaaggaccagacatgtacactggcatcggcggagccggacaggataaagttggacgtggggtcgacgacgagtgaggtcactggttgcagatgtgaggccgttgtggctacttggcgtcctgtacatgtcttaaaaagctgttagacgcatggcattaggaaatgtatcaatcagatctaacatacctcccagacaatcaatcgaccaccctcggtgcccaaaaccaatacatcaccatacttgcccccggcgacagcaatgctgcgtatccgctctggaaatgggacaatgccctcttggttacccttctcccggttgtacacgtgaatgacagccttgtctgcttgggcggcaaaaatatgcgacgggctgacagctagacaattggtcaaagttgagctcttcttgaaagtcgatcgcagtatcgatgaaggttgcaattcatggacgcagacccctacatctctgagcgaggctgtcggagctttggcggatgacagcgtcgacgccacaaatgattcagaaagcatcaggaatggaagaatgaggctgtcatacgaagtatgggaggttgggttcgaagttgtccattccttccgaggttttttttttttcttaatcgattgataacgaaatgtttgcactgtttggactataatctccggacttcaaccatccacgggccggatgtgatctatcctaaccaatttggctttctaactaatgcaatctactaaagatatccccgatctttcttcatcattagacagagcgagtgttttaaatgcatctatcgactgattgtgccgtgttgtgtatgagacccaccgggagttcgatctatcattattagtcagcgtcatataggtcaaccaagctcagctgcgccggtctatcaatcaagatgattctgtttctcaggctattcagactcaaattgcgtgcccatggtgaccagttcaagccctcatcaggcatttatatccaaccctccatgaactatgctgatatgtacaataacatcggtatgaaccagattcatgcaagggattgcctaaagttgacaagaaggggtggattgccgttgcgatgagacaccagatccaatgaagacccgctttaatacaccctctggctgatcctgttgcccttctcaagggcctgattcgccatggctcccttctcccccctcttgcatctcaaatgtctcattccaagtgcccagtcggaacccagctatgacgagctgaggcagcggatggggtctctccacgttgacgggctcccgcaggacgaaagattgagatctggagccaattgttgcccatcgttgtcctggtagctcatcttctttggaatgcaaggacgacgcgacctcattcccactattattacattggcccgtgcctaacacaacccgactgcaagtgttcgtgccaggcgacggaccctctttttatgctcgaagggggaatcgttccgttgaacattttccggctttcatggcagggttgtagtcctgtcaagggatgtgcacttgagcccgatgactacccaccttaaaattagctgactagcgccacactcgctgtataaggacatatcgagcccctgcagggactgatgcccatttgttttgacttcaacaataaacaaactggattgcaatctcatctgggtcgctcttgtgcaacacgttttgctttttttcttcgacatttcggaccaggattcttacttccagccgcgaataccattgtccagtatggactctggtgcgacagacatgcctagccatgcatggtttccggcccggatccaaacgcatataagaaatcagggctccaactcgtcctcactgagccacgatacaatggcaatggccgagccaatcccgtcaccgcgtcgatggtctcccacctatacaccccgcaggcgaagcagacagatgccctcactatcatttgtaccgtcaccagtgatgccgcgcatagagtcgcatgacttttcgaactcccaagcacggcgacccacagatcgggggccaggttgcatgtcgcctttccgctcggtccgaagaatgaaagaaccatttcaattaatgcttccgacatcaccggcgtccctcgatggccctcctcccaactttcctgaaaggccaagcaagccgtacacagcggcggcaggtcgcacattacgaacatggcgctcagaccaaaacctgaattgtggcaacctggagggatttggtcttctacctagcccgcctatatcagaatcacgccccgcaagcacgggtcctgaattatcttactttgatgcgcagtcctcggatggatcaggtcgatcaagtgacgggcaggataagtctggtaccactaaacaggaagtttctccaacggtcgcgacgcttgaaatcggagaaagaatacaatacacagcataccgtcccccagattggaagaaccaaccgcgaacagatgtcatgaatgttcacgaagcccactcagagttcgtacgccagtgcgagtccagcaatgaacgggagtcatacgtccagtctccgaaaaagagtgcaccttctatagcatccccaaagtcaatgcatagcgagagagtggtggttcccgggagctcgccaagaccacaaagaccccggactgggacagtctcgagtgaagctagttgggtgccgagtaacttctcatactgtgaaagatggctgcaaggtgttcccgttgacaagttggacgatcaaaataccactacaaaggagttcaccaatcggcgcaagtgccagattgttgagaatgatcctccaatgccaaaactggacatcatcccgggagcaaaagcccttgaagaacctgtggtaagtccaacaatctcttactgtgaggtaacactgaaagctaacccccatctagagatttgttgtcgccagcaagactaaaccgaaacttgtcgacatcgctcgacaatcgtcaccatcgcctccactaattccaccgccatgcttgctgccaaacactgtaccgacgaccccagatcagcgtcaagaggaagtatccgcatttagcccggacactcctctcgatatgtctgatagtggttatgggactcgcgactctgggttttcctttgatagctatgatgatagcaaagtggatcatgacgacgacgatgcgtataccgatccagggtcactgacctcttcggacagtgttggatcgactgtgatatgcgagaagcctggatccgcgcagggagagcgcgaaacaagcccacaaccggaaatcagatcaggcagcgtgagccccaatgcatcattcctaacaacgacccatttacccgggccgacgtctatcatctctgaaaacgaggatgaaaagccccggatatggcaccatgactggtccatggacgatcatgaatggactttagatgagctagaacactctgtcaaggattttcctcgtcatatgctccgcctcgcatcccctgtcatggtattccttcgcaaaaacgacgagaagaccctgattaaacccttccgcactatattccccgatgtcacagagaacctaatcgactgtctctgtgctgccctcctcgctcgaaactacctcctttccctgtcaaccatccaccgaaacaagccggccatcccaccgcgcaaagatgtgtacgccatcgacggcgtcccgaaaaaagcatacaccaccctaggaattcagctaccatctgggtctgcaaccaagcctaaggacccccttttcagctctcgcagcaccgagctccagggccaactcgagcggatagtggacaacctgctattcgccatctgcggccgatcagatcctactttgaaatcggccgtcgaagttctcgcccaagtccttgaaagcactgcttaacattgatcactccttgcatctaaaatttccttgcctcttttcaacctattctctctaaaacagactgaagctcatacttcgttttgacctctccttttctctgcaattcttccctgcactcttttcctcaagactcctttcctactgactgccctcattatatcctttcatatctgtgtccctaccattactcgctctaatcattgagttctctttgtccttgtctgtccacaatttccgctctctgtccatctttctactctttctactctctttctactctcttcttctcttttttttgcttttctcatacccttgcatcgcgcggtacttggaactttgacaaattcgtgcgtttgggatcaagcattagttagtctttcagtagcatagcatagcaaccataataataattggcatcgtcatcaaccagtattccaacccctagtcgtggcaacaaagtcgcccgcacgtcttttattttcaaatgacttccaatattcctccttaacaattcgaggaaaaacaagatatcgtatttattccaagtataacgtcaaggatagaccccttcccatggatactttcccgatctgatgggcggcgaaactgcttagtaatactttcccgcgggatccattgcgcagacaaactccagttcggctttcaccggttgaacttagcatacactcacacatcatggcagctccaacaagaagtctacggcatctgtcgtctttcagaaccaccatatccccggcttcgacattaattactcccatcggccgccggagctatgctacaacggactcctcatccgccacgaatacaccaggaactacacggcggaaacctacgaagttccaggataagctgaatgcaggaccttcattttcagactttgtttcaggaggccaagatgaacttcttgacccagcggaagcctacgcccttaagaccgcgcttgtcggccccgccggccgcaagaaggaaatgactcgtttgcccgaatggctgaagactcccatcccagactcaaagaatttccagcgcttaaagaaagatttgagaggattgaatctgcacaccgtctgcgaggaggcccgatgccccaacatctccgactgctggggtggcagcgacaagtcctccgccacagccacaatcatgttgatgggcgatacctgcacgcgcgggtgccgcttctgcagtgtgaagacatcccgcgcccccgctccgctcgacccgcatgaacccgaaaacaccgctgaggccatctcccgctggagcttggggtacgtggtgctgacgagtgtggaccgcgacgatctggccgacggtggcgcgcgccacttcgccgagacggttatcaaaatcaagcagaagaagccgagtatgctggtcgagtgtttgacgggtgacttccggggtgacacggagatggcgacattggtcgcgaagtctggactggacgtttatgcacacaacgttgagactgtcgaggagcttacgccctttgtccgtgaccgccgcgccacgttccagcagtctattcgtgtgcttgatgctgcgaagaaagctgttcccgatcttgtcacgaagacttcgctcatgctcggtctcggcgagaccgatgaccagctctgggatgccctccgccagctccgtgctgtcaacgtcgacgtcgtgaccttcggtcaatacatgcgccctacgaagcgccacatggctgttcatgaatacgtgactcctgatcgcttcgaaatgtggcgccagcgtgcccttgatatgggcttcttgtactgtgcctcgggccccttggtgcgaagcagttacaaggctggcgaggcgttcattgagaacgttctcaaaaagcgtcgtgctgcccctggcaccgctgagcgcactgtggataagagcgctgctatcactgacgaggctacccggtgaggtggcttgcatttgaacgaatcgattcaactactcgggaataccttttctcttgtcatctgaccacctacatgtcatttaacctcttttggcgttttctttcttgcatcttctgggttgttggtttcggggttctatagagggatgcgtcatttcaacagttcaacatttcaacacaggaattgtactttatatcaacattggaaaagtcattagtggcctatttttgtcttcctaatttcaagctatacggaaaacaacccagtgatgcttttcttatatcaaatctcaaaatgtgggcctgctccgttcctaacccactacatcccgccgccacccgccacccgccgcatataggaacagcgataaaatgcatacgctataaggtttccatactccgtactacatatgtttcatccacattggccacatgtctgctaaaggcaaggaccgacataaactccacaactctcgaacacagggaaatctccaagtccagcctggcaaccagctatgagcgccggttcaggctagacttttcgaggggtgtaatttatccaaaaaagttatatcagggcaagattcaccagcacacgtagtgtatactctactgaaaacggcgtgttgcctatttaactactcaaggacttattgcacgtcggaggtcagctccgcgatgtcctcgttgtccatgccgagcaggtagaggatatcgacaaggctctcgccgttgatgcggacgggagcttctaactggaccttggacttggcgcgccaggcgacgccgaggcctgcagtgtggagcatgaggagatcattggcgccgtcgccgacggctagggtttgcgagagggggatgccgtgctcagcggcgatggacttgagtagagagcgcttgtgctcggcgtcgacgatagggtaggacggcaccaatttgccggtcagggtttgggtggcctcgtcgatttcgagctagatgaattgtcaggtcggatgaaatagagatagtaggaaacaggagaggcttacgtggttagcaatggcaatgtcgataccgagctgctcggcgagccatgcggccaggggctggaacccgccgctcaccactgcgatcgtgaagcccagagtcttcaatgcgcggcagagctcacgggcgcccttggcgattgtcaggatagacttgagcttctcgaagacgtctgcggagacgccgttgagaagactgacgcgttccttcagtgacgcggtgaaatctagttcgccgttcatggcgcgttcagtgattgcctgcggtggtgttagtcgctggcatagagaattgaagtatgtcaagaaggacttacggaaacctccttctcgacaccaataaatttggcaatttcgtcaatgcactcattttcaatcaaggtgctatccatgtcaaacactgccaggcgcttgtgtcgacggaagacggtctccttttgcagaacaacctcgacgttccactcgcgctcaaagcgccagatgctttcatgcttgcgcagatccgggaaggaaagatagtccgggtttggcggaggagagaatgtgacctccacgacgcgggggtgttcgtcgcggtcaagacagcggtgcgaggtgttcatgcgctgatagggcgtggggagggtttccaagatctgaaggaagttggtcaggcacagctgagagacgtatggcccgtacaggtgatccagtggctccggctctagggcaggcggctcccgtgggaatttgtccatgtcttgtgtcggggcagagcctttgggcacctcgggagctgggatcttgtcgcctggactattctggggccctaaatcggggtggtagtgggggtgaatggggtggtttgatttgtagtagatggtcgcgacgatttgcgacgtgccggttggaagagggttttcttggtggttgaagatgctatgaatgatgccgctgtcggtgaccctatccggatctggcttgattggattcgagctaagtatcagacgatcgttcacctggttagccagaacctcgccgatggtttgactgattggagtgattggtgccatcggtttgtactgctggtggtcctgcaggaatgaactgctgcgcatttggccgagggacggcctggtacgggtagaatctgccataatgtactactagtgaagcgatccggtacagagttattcgcgagtggaagctatcttgacagatcccacacttccgaagtcaaaaacgacttgcgccggatcggcacgtgggactcggtcccaccaacacacacgtgactgctgttcccctctcacgtgagctaccgcttggcagaataattgtcaatgaggtgatagaaatggaccacctccaggaataagatgagctcaattttgggtataagcaccccgtcagatccaccatgacttcaggatatgacctcagagtcagatctatctatttatggatataatatactgcccaaaatacgtactccatactccgtacatactataatcacgattctcctaactatgcggtatgcccagattattggcgattaagaaacctgctaacatgatatgattaggaagatcaaacccttggaagaatacttccagtaataggtatcatcgactgggttggtcatcgtcaattaccaatatccgggaggttacctccatggcttcccgaggtcgttggaatcaataagcaaccatctacgccattctatagaacatgggcagaaccatctccgatatcgtgggtctggccatacaacgtctcccatggcgccaccgccttcagagaatgaccctctcttccatataggaaggcggtgagatcaaaatattcgagcacgcaatcgatggcgatggcgtgcttggggtcttttcagtccccactctgtccattggccaatggcatccatggaggtttgaaatgaagaatagccgatgaagactatgttagggacggatctccggatgatgtgattgcccctgctgttcttatattctcgtctctcattgtcatctgtgactttgttcttcttactctcctacctctccgcacattcaattctattttcaaccatccattcactaccaacgtcatcacagtgccatcccatcttacattatgcccgctaagatgcccaccaactactcctctgagatggagggcattgacaaccatgataacatgactgagtctggttatgtcagtgctggttcaggttctagcgaggactatgtccccgagattgtcttcaccaagccccatcttcagttcctcaaccgccagttgcagttcctcgagccccaaggttcgtactgatatccattgacccctctttctgacgacccttcatctgactcctccttacagagatcttgagatggtgcattacctcacttcctcatctcttccagaccactgcctttggtctcacaggtctcgtcaccttggacatgttgtcgaagctggaggtgcctcgtccccagatggttgatctcatcttcctcgacactctttatcacttcgatgaaaccatggccctggtcgaccgtgtgcgtcgcaagtaccccaacaacaatgtgcacatctacaagcccgctggcgtcgacactactgccgaattcgaagccaagtacggtgccaagctctgggaagtcgacgaccaactctacgactgggtcgccaaggttgagcctgctcaacgtgcctaccgtgagatgaatgtccacgccgttctcactggtcgccgtcgcagccaaggcggcaagcgtggtgacctcgacatcatcgaagtcgacgaggccggcctcatcaagatcaacccaatggccaactggtcctttgctcaggtcaagcagtacgtgcaggagaacgatgtgccctacaacgagctccttgaccgtggttacaagagcattggtgactggcactccacccagcccgttgccgatggagaggacgagcgcgctggtcgctggaagggacagcagaagactgagtgtggtatccacaaccctcggtccaagtacgcccagtacttgatggagatggagcgcaagcgtcaagaggaggctctctcgcaggctttgcacacccagttgactcctgtttgatctgtccttttgaatccttcggctgcatacccttcggcgttctacgtgatacctctccgttttttttctccctgttctttaagcggctttatttttccccagaggcggtacaaaagtactctttgcatttacatcctccctgcacagggagttgagtttagttctcgggcccactatgggaattgtttttgagacatgataatgatattcatatgatgacagaaataaaaaatgaatatttctcattaatctttactctccatctaaatagttacatgtaatcttataatagcctcaaaatccttggatctttgatttgtgtggcggtcacgtgcggtgccaaccctagtttaccctgcatcacggtatcatttctgatccacacaagagactcaaatcttaatttcgaagagttatttatctttcaaatatctagaagattgacatgatgagataaagtagaaactatggccttcaccatcaaagcctgtgacatcgggcgaatatcgtaaagacatattaagagaaaaaaagggtgaggagtttcgaaaaccaatcaatagcacgcattctcggccatgagcctcagagttcgcggcttgacactccctcgcgcaatacgagacttgcacgtacctcgaacacggatgcaggggcttatgtaaaaccacaattcagacagctcatctcaacatatcgacaccatcatccgggagatcatacaaggccattgcatccaccaaagctcgcctcggcactgcgaagctcttccgcggtagtgacagcaacctcacacagatcagatctgacgccaattacccgacatctacgggacacagcctgcgcaaggctctcgtcagtggtgctctaagtaaacggcgcgaatggttccatattgctgcccatctggggggattatgccctgctcgtcgaacatgttgacgaatgcctctagtagcaaagggacgataattttagcctgctcgtctggtgagagaggggagattctggatcggccctcgcaatcgtcgtagttgttgtatggattcgcgaagtcggaagaatacggcttcgcctgggacgccggggagagcctttacggcgaaatggtagtggttgcgtctgccggatgcatcccgctccgggcgctggagggcattgaaactctataattgtgaggcggtagcactttccattgttgtgatgatttatggggaaaggaagggatgttttgagttttccttattacgttcaattagccttggatgatctacgggtggaaaagcttggcatcccggggacgaaatgccttaattcatacttttcttccctctttcggctatgctatcttcacgctgcaatccccgcaggactatcagaaagcccagcttcttatcagtacacttcatcgttaacaagtgcttcaaaaactggtccattggaatgacccctaaatgttcgcagctccgccggtctgggcatctcagagcttgatgattatattttacttgacaagagctagtctcagttgctaaaggctttcgtgatactatggctacaactgcatgtagcatattgaaccattcttcgacttctctcacattactctcacttacgaagaccccaccttcgactccagacgccgttaaccatatagaagaccctctccatattttcttcttccccattcaccccatcttcactggagatttccttcatccatcttccgatgttggatatggtgatctccacaattccacgagaacaaaacccaaaaagtaaggggaaaaccgacggagagaactagacaagcaaacttcgacgctgtcgcttcctcagcgacggcgacagatgagatagtgtacgacttcagcggaatgacaatcgcaaacgacgacggcgacaacgaaagaagatttgccgggtcagcgactctctcaaacgaaccgacacgtcgactttgtgcagggattacctctagtcggttaggcggtatttagaggcatgtcttatccatgaaggcaacgtgggggaaagggaatggccctattcgctctcttacggcaaatatcagcaaataggctaggaaacatttatcgttaaaccagttatggtttcgaagattgagcttatatgctttaaacttaatactggcgttttatcctagtaatcactatatctaatcggggtaatgagtttaggcctaggttacattatagggaacgacggagtgaattgaaaacacctgactgtaccggatgggatgaatcaaaattatcattacagaaaggctacggagatgtcttggaatttgcttatcccaatgtggttacaacttacattcgagtgatgtcctcaatcttgacaggggtacgtgtcaggcgctagtcctaggccaatcattgggtccgaagatgaggttagcttgaggacgtgtttgttaagtgtaagccacctactccgtcttctcatctctactatcacccccaaaatagatgtcttaagctgaagtttgtcgaaggtattgtgaaactgttgagagcccgagagaagaaacaatagcggcttcctctcctggggcaatttcacccctgaggatcagcctgagatttccaacttctcaaaaacatggaaaactgcacctacttatagttctatgtcatcttcgaaataatcaaagaggatttgagaagcgactcagtatcgaaagactgttgaaagatcagcaaggttatcagaaattccttgcattgctatcatagggccgacgccacgatgaaagggaaacttgatggcacggcgctcgatgcgatcaaacaaggccacacagagattatggggatgctaactaagaaaggcgccgtggcttgatctagcacgcgaatcaacaagccaaatcaaactgatgcatggctgtttcgtggagacgacatgagacagactgttctatccctcaagtgctgcgactatcctttccaaagccaaggtcaaaaattcatggccctgtgtaaacacaagtcgaaaccacccatccttctcagatccaaaaagaaaaccgctggccaaaaagaccttcttttgcaaaaggtgctgcataacttgttcgccaacgttctcgcactcagtttccgggtgaagctcgcggtatctctttcccaggttcatccagacgaagaacgcagcattgcatcctgtcgcatattcaattccgtggtctttcaggtagttcgctgtgtacgcataggattccgacagcagcttctgattttgttgaatataccggtcggtgaaatcgaagtcttcaagcagaagagaagtcaggtgatccgtgatcccagaagcaaaagaatagagcgatgggcccgtcatcgccatatggaaatcacggttggcctgggaaatgatgacaccgagtcggataccgttcgcgccaaaatctttgctcataccccagaggacatgaaccaaacgggggtcgataatgccagtcagatcgatggaaagggcggattcgaatttgacaggtggtggatatttgtcgacggtattctcaaagaccgaaagcgcatagatttcatcgctgacgaaatggatctggtatttctgacagagccgcatcagcttgacgagcacttctttgggatagcagcgtccaagcgggttgtgcggatgcgcaagcatcaaagccttgactttcttaccagttgttcggtgaaactccagcaatgcttcttcatacttatccacgctttcgatgctgagagggtcgtgttctccgaaactgacaggaaccacgggactacgcgaacgcagtgagatgtcggggatgaacatgccgtagtacggtcttcctagaaggatgccctcgccgggatctgcgaatgaccatgcaacatgctcgaccgcagacgagacaccgttggtggctatgacgtggctcggctcgagtggcttgactggcttcagatggcggtccaagaatgcggcgatggctgccttcaatctggaagagccagatccgccatcgttgtaggtgaggtacttggctggcagctcgagcttcttgttgatgaatttgaggagctcgtcgtgcattagtgtgttttcggctacgcccacgttgacataaccgttggggtttgttgacgcgtcccacgcgtccttcatcacgtcccacatggggttatcggatccggcatcgacgacatcttgtgcccgacgggagagaaccgattgggccattttagaggtcgcgaaagagttttcacagagatgaagtacgaggaagtacgaggccaaatgagtgagtgaagagaatgagttggaagaaattggtcgcgaggcaggtccttagatatcggttactaacggctgccgcaaatggcaagtctgggttatctccatgcggacagagatatgaactgtcatatccgaagggcgtgggcggtgacaggtaaagatatcatctagggcatttcagccttctatattgatcttcacaacaggaaggcatgaatactctagtttatttttctagaacaaccttatcaaacccattcccgaggtccaatagtttttgcctttcttgacgtcaaatgccaagcttcgacgtgaagatatcatcatccccacatcaaaagccgaacaccgaactacagtccatgaatatttcgagaaagacgacaattgacgctgatattaagattgaaatatgcatctcaaattcctaatcaagcgcagacaacacagaattcaagcccattctatctgttagcattgattgcccagcacgacgctctagcccccgtacagcaaacccctcgaaacccaaggagtattgctcaatcagaagtatgtatcacacgtcttcaaaattttaaagtaacctccacagcacagttgagcacgacatactgaggcgtcaaattcacgccactggagtgacggtaggcaggcatctgcggatacaccgaaggatccaagggctcagattcaatttccctaatattcacgatatgcataggtgtaacatgcccacagggaacagctctcgcatactgatttaccttcgtgacagcatcgcacacagcctccttgcacgacttgacaccgatctcacgcctggtagcatcggtgaggtaccagctgatattgttcaatctagcgttggaatagcaatccagctcatcaacaaacatgcgcagctcgtcgaagtcaaggaatatagggttggtcttgacggtggcgcacacgtgggatttatcaatattgtttctttcaggccgttgaaggtcttggtgacttctttcgagaccgttgcttctgactcgcctgttgattatatggtcaggtggactgtggctcgctctgggaagcgacgtgcggtggaacgacctcgtagagtgatatggaggggcatggtcggtttgggatcaggaaccaaagtggacgatgatgaagatgatagaattaggaatttgggggtttaaatggccctcgggataccagacggtggaaaaaacattggggacttttatacagtctcaaaagtttgaattgattcttctcgaatacaaaccaattcttatcaatttacttagctttcaatgtcaaatgctaactataatcaagaccactcaaccaagcaattgctcctgcttagcgccctcaacagcaacgagataagccggacgatccttgacatagaactcgacgtcaacctttcccttaaaattagcctctccaccgtctagggtcccagccttgatgcaagtcatatcgggcatgatctctagttctgtgtagagactcgagccgcaggtcgggcagaaaaagtgtttgttgatctttccactggttccgatcccatcgtaggaattgggggtacctatgcagaaagaaatgtggagtcagcaactgacaagcggattgtgggtgtgattgtgatcgcggtgcgaggtgtagatgtagttaccttttgtcactttgaagctggcgcggggaaccactgcgttggaggtaaatgcaccgccagaccactatttggtattagatgttatggtcaacgcccatcggcatatatgtataagtcttgggtttcaccttctggcagtcgttgcagtggcacagggcggacacatacgtgtcggctaggatgttgttagctttggatgtggtttcgatcaattgatataccttcaacggtgtaagcaatactgccgcacatgcagcttccagttaaagtcatgttggatgcaggatatacttagtatgcgtgacgaaacaccttggtggaatcgaagtgcaaaaagcggggttggtggcggctttaatactcggagtccttctggggtcttctccgatcgcgggtttaaccctcaatcaggtaaatggtcggtttactgcttaatagtctagaaaggcaggaatcgatataggcaggcagaaaaagattggcatcattcctagaaacaagaacctgctttatatacatcatccaagagtcaaaagcagtcaaaagggactcgacaccaggtctctactaaaacgcaagattaaaaaatcagaagataagaaataaatgaaggtaaagatgagacaagacagcaatggtgtatatcactttagatccacgcgagaaacatcactgaaaagggataagacagaaggaaaatggcgagaaatgaaggaatgacaaaaccggggtatagagaggatacataactgcaagcttgatcgaactagaaacgaagacattcaaatgcccccggggcaaaaggtgttatggggtattgagaaagtgagattgtatgtccacaaggacagtctcttggtcaaaatgccagcactttacagtatgggaacaactccccaaggagagccaagtttcatcaggttctcggctttttatatgcaccttcccccgcggatccatcgtctggggattttctcttcttgtcttgttcgtcttctcgagagaaaccgggaccgctttgtactgccggagtcgggaaggtgaggggactgggcagcatgttggaatctgggcctgaccggccaaagccccattcggggaagaagctggaaggcgacgggaggagtgcatcggatacaaagcgactcggcaaggcggatatgggcgtttcgatattattcgagttattcccattgttcgggtttccgctgctgctgctgtaagagtcgtttcgcgaggttgaaacaggaggaggcgggcgcgcgaacggatttggaggcccctgggctcccgcactcagtattgcaccagcggatggcgacggagggggtaagaccacgcccgggggtccattttcggcacttcctttcacaggcgtggaggttctattcccagcggaatcgcgtgacgagtcggccgtggcactgccaccatcggaggtttcgctgggaatctgcactttcaactgtggtcgttttgatggcaacggtccactgttagttcgggatggtggtttaattctttgcgttgaagcaactggccctgcacgaggagtttccgtggcagctctgacaggcattgacttggtaccaagggaagcttgtgggtcgaccttgagagagtggttattgtgagactcatatgaccccgctccagctccaaagtggcgggcgagcacagaatctcgatcatcaataggggtgaagatactccgtgattttgataacgacttcatttgaggtggcgactggctgtgctctggtttcattgctcccgaagaatcatcttggggatgctccgaggcaggccgttcttggtgaccatcaggcgcgaaccctggaggcatcgaatttctcccatgttccggcatatatgcttgcatatgctggtggggccccggaggcattcctgcatggccgtgctgttggaaatgctgttgggcctgatgctgttggctctggtgctgtgcctgctgctgtgcctgctgctgtgcctgttgctgcgcctgctgttgcgcctgatgttgagcctgctgctgcgcctggtgctgtgcctgttgttgtgcctgttgttgtgcctgatgctgttgtgcctggtgctgtgcttggtgctgttggctctggtgttggccctggtgctgtggcggcatttgctgtggcggtaaaccatgcgggtgcataggaggcgtcccttggtgttgtcccggtgggtggccgtagtgcgcaaactgtcccggtcgaggttgttggttcattacatgaacattcgggttgtacatggacggattgggcatgtacgtgaacccgccattttgggggccagggggtgctggcgggggaggtgtcccatgttgctgggggcctagatttgaactgactcgacggatatgatttcttgaagagggacgggaagtgccttgcggttgcggggtgccatgacgggtcatggcatgatggatcgggggtgacgcggagggtgcatggttcatgtgctggaaggcgggctggttttggaggtgagggggaatagcggggtggttctgaactgcttggatctcgtcgggagccggcgaggcctcatattcctcgtcatcgtcatctcgcttacccgcgaaatcttccggacctttatgctcgtggggaggaccgaactatgacgattagttagagattgtcgggatgaatcgaagagacatctacccacatattgatagcgaccaagagcctcgtgcatgtcgcatgatgagtactcgtataatttcttgttgtggccaaatataatgacagctacgtcgacggagcaaaggacagcaagctcatgagccttcttgaacagacccccctttcgttttaggaacgtgctatagccgaagaagctttgatcagcgactggaacggctgactgggatgattaacttacactgagcggttgcggtcatctttgatggccttgatctcaatcttcctgcgacccatgatggatggctagggtgcaccaattgcgcaccggtagcaagattgagaatgaaggtacaagcagccgcggggcgacttgcgagatacctcgcgactatatttaattacccaagatacagaatcgacgcgatggcgattctagccggtgccgcacggggtggatgtgtacgtgaagaatctcggtttcttccgaatgagaagatccgaagaacggtgtggctagtcaacaaagggatctgaaaccagaaaccagtttgttttccatgtaagaaaccctgtagatactggaagagggggtatggacgcgacttgaaaacacccccccgaagttcaaaaagaagttgaacccgaggagacggaagggtaggaaacaaaggaacaaataaaaagacaaacacgaagtaaatgatggaagctgcggagaaaggatgattgacgatgcaggaaaggttgattctaaagatagaatcgagggagagggagcccgagaagatttcctggctgactcatcagggccttaggcgccgggttctatatttatcttttggcagtcgcagcgcgaatatgtcgactgagcacacggtaactcgttgtagttagtgctgtccctgtggcttgtgacagtggagtcttgtccttaggatcctattggcaagacaagttgctgtgatagtattcttcgctctcagcttggatgggtctaccgtctatgctatgatgtcaacccggggaagctcaagctcaatatatacaacagatatataatgacatagtagtggaataatgatctacagaatatcatatttacattttcaggctatctccataggttatttaccccgtagcatagcttatttatgtccccgtgatatcgccaaccctatctccctacaatatataaagagagccagatcttattctcaagtaaacgtcaaagtaaacattcagggttacatatgtatatgtagaagtatatgtaggagtatatgtcaagtatgttcctacatcccccactgattggtccatgacatattgggcagatatacgctgaagacatatcgacacgtctaatgaccgtcctccaatagaacatgtcaatagccatacacaaccttggatccccgaaacccagatcaaacagataatcattgtatcatttctttttatccttcaaagttcccaaaatttaaatcgaaaatcttctttgtgtggcagctgggcatctaacgcagtcgagactcgcgggtaagtttagtttggtagtttggtttctgatttacccctgagcttgtgaatcgcttcgttttttttttcccttctctcccaacactttgctttcttccgctcttttcctttcctctcctttttcttttcttgaggtctcttgcgcggtttccactctgagaagcacagacaaataagatcctaaacgagggattcttttactttgtcctgctgttaccggggctgcaggacatcccggacacgcctagacgttttaactattcgctcggtcgaattgccgtgtcggttatctgcattgtggtcttttgaaatctctactaatctgttgtcgattaacagaagtcccaaaaaagcggacccttaatctctccccacagtccgttttctgacgcgcaaattcaattgccagtggccgaccatccgacatgtccttcctttctcgggtgtttcggggcaaggactccactgcgacgaagaagcaggctaaacctaccgcggcgctcaacacgggccctgcgaagcctaaatggaccgatgcgtggcagcggacagaggtcgccccagaagaggtccaagacctggtacgagggtgcgtgcatgagctcaaggcccgaggtaagtggtggatttccaactcgaccgtgagatacggacatggcatggtgcgtcggattgctgatcattcgtcgctgcagctcttcacacgccattcctcctcctaccgttccgtcctagctccgaccccagcgcagctcgcacgttcattcgcaattactttaatcagtctttcgaaaagggatcgcccgtgaacggaaatgatttgtcgcaggagctccggctcacggagccgatggtgagggataatgttttcccagggattatcagggggtcgctaatctcattcctatgaataggtcctttgcggtgtgatgaaatggtgctggagcagactccctggcggtgttgtcacttgggaggcgtacgaaaccttcaagatgggcgaaaatggtatgcgatattctttggaatgcggggaacatacgcgctgatgcaacattagattcggatatggcccgcgacgctttctcaactttcattccgatcggcggcgactccgatgcacgcaccagtattattctggacttcttcgatcttttggctgccattgcggcccatggaaaatccaatggcttgggaggtcgcaagctttcccgatacgctggctggtgggcgtttgagcatgtcgatacaggcaatggcttcgaggccgcctataagaactgggctgtgtatggacttcattaatccgatgtttcggatggtattctaacaatctctagtgctgccgatgctaccagtcacttgttcttcgcctaccttcgttcgttgtctcccgatgtccctcgcggcgtgagcggcatctcatcgctgccaatttctctccaatcactcgttgaagcgactgaatatcctcccgaaaccccgacattgttgcaagttacgactacaaaggtgattatgattgtggagaatgtctccccgaccccattctccttgttgcgacgcgcaaagaactttgaataccgcgacgacgactggcacctgcaggaatttgccaactacgaagacccagtcgatgcattgaccgacgagtgtctccgtgttcttagatgtatctcatctacgaatcaatccagcgtctcgagtgccaagcagtcaaccagtttacgggatgcatcttggtctcgcttcgaggatattgggttcggtggttcgattgactctgacccggaggacgaagccaacgagactgcttcgccggcgactgcaaggggtggatctgcagcgggcttgagctccgttcctcaatctggaactggggactttggccgtccgaccaccccgtcgtgggcagacttcatgtcatccggattcccggatgaaaacaaattgaaggaccacgtgggccctctgctcctgacccctgacaagttcctgcccccccttgcctctgcgcgtggcatgagttctcagtcgcacaagcgctccttggatatcgagccggctctcgagcctgcggagttggcgagtatcacctccctagacatggacgattcgttctggtgggtttggatcagcagtttatctggcgatgagccgtccgcacgcaaggctgtgtttggtcgatgcgctctcctggagaccaaaatccgggataccaaatggctgatcctcgaagagcagatcaagggtgctgctccagagcctgaggccggtgctcagattgtcgaaaagaagcgattcttcagctttggcagccgcaggggaaagctcaatcgccgcaagtcgttggcgaagaaggtgccttctattgaagactcatacaagcgacccaacaatcagggaacgcaaagcaagactagcatcggaccggatcagcacaagcggatccaggaagctgcggccgctctgcaaaagaagcaccgcgagcaagaagcggaggcgaaagagaaccgtgcaatccctaacgataaccgttactccaagaccaactccatcatgacccttcagcctgccattgtgagcgaggcctcccaggccatgaagtggactaagaattacgataagggtgccttcagggcagcatatctcaatgacaaccgcgctggcactggtgaagaacccgaggacaaacccgaggacaaacccgagccgatttcgaaggacaccgaggagaagtctaccgcgccattggcacctcttccaaccagcacctcaaagagtgttcccccaccacttcccaaagaagcagcagcagctgctgtgtccactcctcttcccccttctcctagggaggcgccaactaaagctgttaatgtcgctactcccgaagagaagaagcccgtcgcaaagcctgccgttgttgaacaacctactgagcgtcgggaatctgtggacgaggggggcaagaagctgaagaagaagactggcaattccggctttaagagcatgtttagtgccaaaaagaagcccgaacagcaacagcctctcgtgaagaccgctaattccaaggaaatttccactgtggcagctactcgtgcggccctcgaggccaaggcgaaagcagctcaggagtccggtcccatgaaaaagaagcctctcccgagtaccgcgtccgtggctaaattgcaaaagccctcgcctcagcgtgttcaaccgaccgccaaggaaccagtggcaaacccctcaagcccggctcaagcctccgcttctctggaacagaacggtgagccgccgaagaccagacgcgccattgagtatgatgctctctcgcgcgttgctacccacgaacttaaagcagccgatcaggagttctccaagtttgaccagggccccctggctgaccagcctgctttcgtccccggagattctcccatcacacctgtagctcaaaagtccgaggttccccagagcccgtccaacggcaatggtgttcgccatgaggtcgccagttcgcccgagtcacctgaagctacacatgatcgctggaaggcgatccgtgaggctgctgctcagcggactgctgcccaagaggaacaggtgcacgaccacgataccgaggccaacacccggactagccagtccgagcgcactgacgagggagataccagtggagaagagagttagtaacttcatccccaatactgaccacacactaacagttctttcacagccatcgaggcccgtgtcgcccgcatcaaggcccgagttgctgagttgaccggcaacgcggaggatggtcaaaagcgctagcctgcgacgttcccggacctgttttcttttgtttattatccctgccatttccccctggctctctattcagtatgatccaggatgtatcttttgttaatcgtatacccttctcccgaccagacattggtcgtgtttgctttgagcgcggtctgatgaccgaccaaggtcaccatttccatatcctggagattagcagactgacgaatactgcgatacgattgatggattctttatttggttgcgacatctgtttattttttctttgatttcttgcctcttctccgtcaatatttgattcgagtggacaaatatcctcctgccttggcttatttcttttccccacctatcgaatttgggctgcttttttgtctgtcacttgctctattcccctttcgctactgctattgattctggttcgctgccaatatgaatcgctttgtgcctttaagttgaagtactatcaatgtaatatggaactcttacttattccaagcatacaatcaaaccagactaattcactaatgggaaataacatacaatatagacctgctactgatctcaatcttaatcatatactagatactaatcctaaacccgaactacaaccccaaagccttcagaatcgccttcccaacccccgtcgccgacgccggattctgccccgtaataatcgtcgaccccgtcccagccgccttcccaataacaatcatctcctcccaaggcttcgcagctttcacatacttcccaccagtaacccggcccagctccgtctccagcataaacggcatagcagacgacagacccaccgcatcctcctcgttattcgagaacccagtcacgccaacgccagagataagcggcacgccggagggcgctgtggcatttagcaggacgcaggggccgtggcagacggcggcaacgggcttattggctgcagcgaaggcctggattagagcgagcgaggtggggttttcggttaggtcgaacattgctggtgtgtatatcgttagaggatgttatttgtatcgatgggatgatacaagtatagctaggagctgaagaaggagggagtagaggtatgggtatgggtaactcacgtccatgaccgccgacgtagaaaatggcatcgaactcgccggcgcgcggaagtacatcggctagcttttccgtgttcgtccagagagctttttgttctttcaggaacttctgcgatatcgggtctgactcgcacatctttatcgaggctgggcttaggggtgcttcgccgccttttggtgaggcgacggttagggagaccttgtcgcggaggacttcgtagggatgggcgaactcggactttgggatggtatggttagtaaagggttcattgtaggattggtttattggtgagatggaatggaacatgtatgtatttaatttgattgaagctggaattggtgttgcatactagaaaccagccgtttggcttgccggtggtgccgagcttgtcttctgaggtgaggacgacgaggactttgggtgtcattttgggtgagttgttgattggtcgtataaatgaaatagtagggacaagttgattgtgttcaatattttcattttcaagtcggactgagggcgaagggtggctctgggtctttctatatgatcagcatcactgtacaatgtacattatgtatgtatcactatcccgtcattgactccacaaaggtcaataaattgttacatgagccaatgagatttgttagaagaagctctccactgcagaagatgtgcagctcccgatgtcaattatatgatgatgtcatagctcacatgctcaagtctcctgatgtccattcaaagaactgatatattaggagtcactatggtgtaggctgggtttatctagtcgcacagcataaacgcatagacatgagccctaaggtaaggtacatacgctgtacctaggtagttactagatatcgtaaacttggtatttggatattgaaaaaaaaaaagaaaaagaaagcatcagcccaggcgagcacagcctagcgattcttacgcgcagcggtgttcatgccgatgttctggttgctgtccaggatgctcgcagactagcgcttcttttcttcctcgatatttttgagacccttctcggtcttcatcttttcccggccttggtgtgaaactggtgactgagttatctgaaggcttccttttagttcatattgcgaccaaacttatatatataccacagttggacatcgggcttgagttcatggttgaacacatcggccatattgtgacgatctgacctcctacgtacgtgccggacgtgcctgcgccagctgtaccttccgtttctgatagaactgctccttcctcgattggaagtgaacctaaccgagcttccgtcattacagctcgtacaaaccccggttaaagtaactcgtagatagtttttctttcctttctctctctatactttgtaacttgagaaaaatgcactcattcttctgaatcgaactggcttgtaacacatattatgtacttcgtgctggtcacactgcttatataggcggggcgatagaagaaagagtaagggatctatggggacgtgattattcttatactcctattctcccagcgcgcgtgctcctcacgctaaggtagaaaggtgctacagtaaagattatatgaatataagagcataggtaccgcacgctgccacgcagtgctgtggtttttgtcagattgtgatacaagaaacccgtatgcagttcattatagagtgaataacatctgataccctgtcatcctatgctgtaggtgcggatagtggggcgaacagagctgtggaccaatgaaacatcatgaatggggatatgtaaaaaatgtataattatgtaatgatacatgtatagttaactagttatccaggatgtattagataccgattacggaagctaagccgattggtagagataagataaagacggatcacgtgattgatagggacagccaaactccggggaagactaaactccattttgtacgacaatgcataaggtgacatatcaaaaatgtccgaatcaccacggaaaatcagctccaaacgcgaccgccctaaagtacctttagatcaacgcaaacgcattgtcaaagcctgcacccaatgccgcctacgtaagcgtcgatgcacactgcagtcgcccgagggatgctggaattgcaggaaaagcagtgtgacttgcatttttgagacgagggaggacagcccagccgaatcaccatctaggtagcccatgagacacggacttccctttatttgatgcaatctaattcgcacagtcaaactcacatcgatgacgatgttgtagcacggttcaataaatcatatccgggggtcggtctcaagtcccaccatatatcttttcttttcgagatattcaaagacttgaaccaagactctagagatcgctcttcgaagcggagaagtccattttggcatactagacccccaccacagcatggaactagacctatgtctgtggaacgtcacccaaatgaagggcaactgcctggtagggcgagattcagccgcagatgtgtacttgctccgactgacaacttcactgaaggtgacgatatactgtcacacagacattttctcgcacgtgctgctgctgcagtctcccagtctgacagactggatcttccagaggataccgtatgttacatgaaaacttcatattgggctcttctgactgttgccgacttaattctcaatcagaatttctatcccacagacgaatcatattgtgaaaatgaaatcatcctcagacagcagatcttgaaagatttcccctctcgagccggggccgaagttctcatggcatcatttttctcctatgccgaggccaactggtactacttcgacgaaagcgcgtttagaaagcagctgtttgaactatatgacagtgacctatcaccgacctaccctagtctcaaattcatttgtttggccctaactgtcttcgccatgggcagccagttcgttcatctataccatgctgacaattcgattgccttggaagccatgactgtggttcaggcaggaatcccagggacgcggtacttccaacatgcgcagaaacttgtgccgcagataatagcttctccttctctggaaggcctgctgagctgtctactactcgccttgtatgtactgccgattcatagcactgaaacttgttacacatatcttgggcttgctttgcgcatcgcaatcagcctcggtcttcatcgaaaatcaacaaattcggcattatctccgtcactttcggagctccacaaccgtgtgttctggactacctacagcattgaacggtatggctttctgtatcaccttgattcttatctttctcttaataatatcccagaatggttgctctctctcttggctatcccgagacgcttcaaaccaaagatatcgactgcctccttccccaccgacagcctgacctggatgttccgggctcctatagagccgagagactactggcaaatacaaggttgactctgctgctcaacgaagtgatttgcttaaggtaagaagcctattgtaatctagataaaggaagctagacaacatccccagctggcatgctaaccctcaatagatccttgaagcacggttcgaccgaggatatccgaagtcaacttttggcttggaaggcagacctacccgctcaattagccacattggacgataactgtttacgactgaacgtgcatttacaactccactactctatgatctggatctatatcggtcgcgcagccctgatcgacaaagtgcgacgcttactcagcaagaaagagcccacaaaagatgaccttgacatagcgggcgacagccaagaattatcagacgcttgcgcagaacacgcagcgcggataatcgatctcattgatctgctcagaagtcgcgggcaactgagtctattctcttacactgatttccatacctgcagctccgcaaccatcatcgttctcctggatagtatcctgaacccacgaatgtcctcgtttccgacagtccggaccgcaatgggcgctctgcaatatatggctactggcagtgatttggccagaaatagcctcaagtatgtccacaatttccaaaacgtggtcaacaaagccttggcgtctatttcctgtttggataatgggaaatctcgccctgagggagagactggcccacttccgcttggggagccacgtgaagagacgtttaccgaaggattggacatgtaccagcatgaaggcgaagagcctaacctggccctattttctgacatagggattgcactcgaagactgttcatttacagagctacatcttcttgggcttgacagcctatactcgagtgatgtacaaaattggaacggcagttagaaataaatccacgtcttcttttccacttcaatctcaacagaatattctgtcctccttgattatccttttgcttctttcaaatttgtcaaaatgctatttgatgcacgtaggtgtctgcgtggccgaaagaaaagagagatcaacagcagtggggtaatatgataatgatttaactactagtaaatagcttcatggagacaaagtaaatagcttcatggagacaaagaacaaagcaacaaggcctaaaagccacaaagggcaaagaaagttttgacaagctgcttataaacaattccccaccgcatcaacacatcacattaaatcaaaggttataccggaaattcttgtcttccttgtctgtcaagtcctttccagtgacctcatccgcgtactcgaagatatccatccccattgtagaccgacgtttattgtcacgagcacacgtgaaccaatacactccgacggtcggaatgaacacaagccagctaaccagagccaagacgagaccactgcgatacctgggtgcatttttcgtgttccagagtaatggtccaactatagcaccgatagcgtagccaacgaagaacaaagcgttgacgatggcctttttggtatttccacgaatattggaagcgtttagacttaggatgaccgttaagatgtttgagatgacggaggcctttgtaaaacaagaattagcaaaattcagtacaagtacgagggtgtaggttcagccaatttacataccaaccacgatgcaacaatcataccccatcccgaggacaaggggagcgtgaatagtagaatgattccgacgagcgggacgattgtaagcccgatggtgatcgcacatcgacgattcggccaaatatagcagagacctattccgacccaaataaagaccatctgaactgcacctgctggtgaagtgtatagcatggtatcgaaatttgtgtagcccaaagagtagatgataagggaagcgaactgtcaccggagtatagtcagtaattgcacacatgtcttcttgtaagagaatacgcgacttactgcaatgactggcgaaggtagtgtgatgagaagcccaaataggaaactcaaatatgctctgatatccatagctgtctctttcaattgcgagatagagaaagttgtctggtctcctccttcggtttccgctcgcaatcgttgtgttgctacttgtcgctcttcaggggtgaggaaccacgctgagtcgggaccagcgggcatcaagaagaagaataggattccaaagaagaccgtgagagctccacagatgatgaacatagctttccattgggcaatggccaatgccgtgttgtgaccgataccatacatcattagagcaccgatgacctgagccagcccgttgcagctgatccatagactagtttgagaatttgatggttagatagagaaaaggtagattgggggttattagggatgtcctacccgatgcgcatgggatgctcgcttttcttataccagagactggtgagcgtcacaaaggcaggcgagaccgcaccttcagccaatccaagggcaaatcgaacacccatgaaagatgagaaggttgttgctcctgccagacactatcttgatatcagtatgtcttcaaacaaaatgttggtgactgggtaaattaccatgcaaactccaccccagagtatactatactcagtcagatttcccgaataatcttgatgaaattgctcgaaactcacataagacaggatacaaatttggcaagcggaagacgactcatcaagtagatggccgggaattccgacgccagctgcccaacgtagaagatggaccctagccaggcgaactgtgtgcccacaaggtgtaggtcatctatcaatccgaacacaccagcgtaacttagactctgcttgtcaaggtctagatgcgggatattagcggtatccaaaagcaagaggaaccaaaacatgaatcaacttacactgagagaagtaaatcaagcacatcttcaagcctctcacgatcagcacccattcccatgatatcgaacaaggacaattgcttaccagtggcaagaccaccaaatcaatcttccatctgacccgtctctcgatcgcagggtcaatgtggattgccgaagtgcctgtttccataacagtcttcggattggattcgtccaattgcatatctgcggttttggtatccgattgattcatcatgatctgagtgaattggataagaaatggacatgcacgatgtacgaaatctcactggggggaaaaggagaacaataccccggcctttatatatgacaaactaccccggatttggcttatctctcgacagccgtgaatgcatgtagtgggtaggtgcgtgcgatccacttctggctctatggaaacgcgacatctagtccaagccactgagcattggcgttatctttcgttggtttgttttatttaataaatcgtttatagggcaggataaagcctgtggtaggtaggctgtaatcgtgccaagcaccaacacatctatagtgggccccaccagatagtcatttgtagaggcaggtatctttagtatctcgactgcatacaaaaggtacataaacatagtctcaatatctataaaccttgaactaattagggagaatgtaggaatatagttgtagagtagacagcgtcttgattacttagtatcaatgttagtaggaacatccagtatagagaataataaacttttccacatgatgtctatatctggtgattgctaacgagtgtctttacactttgatatcatatactcaggatcaatattagtggtagataacttgaaccaggctttcgctatatctttatctctttagatttcctgaagctggtctgatagttgagaaaatcgagatgatgcctctatgttgctcatgtaccttttgtatagtgtcgccatacaaaagatacctaatccttacaagcacccggtgattagccggtgagatctgcgggtacttgtacccgcagggccggtctctgttgccaccgaagtagatttgggatgcgggtacacgtacccgcacgtcaaatgatggcgagtatcgatgccaagataatgctatcggcaattgtaatacgtccagatagactatcatttagtagatcatacttagtctacaataaaagagctgatcccactgcggtggaaattgcaagtttcttgttcatcctattaccaccttggaattaagaataaggcttcaatatctttgaacttgcctgatcatcgataacttgcttacgtctttctccttgttaccactaccaccatgacagcccggaaacccgatcttcagcatattgccaagccttggctgctgggtgctcaacggacgtacatcttcacgtctgccaacttgattgaccttgacgctggaacagtcatcaagaacacgaccatcaaactctccggtggccttgtatcattagtcgacacctccggagtagagactggcgacaatgtcgaccccgacgctgtgcaaatcgacctgaaaggcaaatacgtctgcccgggcttgatcgatagccatgtccacatcgctgcagtacctggttctttgagcctccgggaactgaaagaggtaagcagtacccagagtatgctacggcaaccgggtgtttgcaagtccatgctggaccgtggtttcacgacggtccgagattgtggaggagcgtcttttgccttaaaagaatcaatccaggaaggcatcatatccgggccgagattgttcattgctggacatgccctctcccaaacaggaggccatggagatcgtcgtcagcagcacgaccccaatgagtgctgtggggggcatgtgaatggggtcggccgtatcgtggatggagtggatcagtgcctgaagtatgcccgcgaggagttgcggcagggcgcggacttcatcaaaatcatgggtggtggcggggttgctagtgccacagacgagatccaacaccttcaattatccaatgatgagataaaggcgattgtcacagtggccaacaatgcgggcacgtatgttaccagccatgcgtacacgccagaggcgatccagcaggctatccgacagggagttaaggggattgaacatggcaatctcattgacaaagccacagccgaaatgatgaaggagtacggcgtctttcttacccccaccctggtgacatacgcgacgatggccgctcccgagttcagcggattcctcccccctgtttctgcgggcaaaaaccgtgaagtcttggacaaaggccttctcgccctggagctagccaatgagattgggcttgatatttgctttggcacggatcttttaggtcctctgcattatgcccaaagtaaagaatttaccattcggagcactgtccagacaccactggagatccttcgaagcgctaccacgactcctgcgcggatgctgcgacagaatgaattcctgggcaaggttgctccagggtttgccgccgacttgctcgtcttgaatgcaaaccccttggatgatatcaccgttttggatcgaccggacgttcatttactagcaaccatcaaggaaggccgagtcgtgagctcgcgttggaatgtgttggacgttgaagaaaaccgtctgccaaagatcgagtgagaggtggaggggagagaagatgtacagtggaaatgaagaagaggttcgttctggagttcattgaagagtgcttcgtggtggcggcgaaagttttattgatagagtcgataaacatgcacggtgtgcaagaaatggcaccttaaacgggagatcaaaagatacattacacagaacaatactttccttgataatacgagccatcccgcaataataatatgcttcgaatcgcggctattgctggcagataactaggccaaaacgagatcttccttgatacggtaatgtataaccgttggcggatcttcgtaggctctgttcccttttttatagctgccgcaatcagaaagagtgttgggcagacttacttgtgggctcaattccattctcaagtcgctacggagtacggagtagacgggaggggtttaaggtagtgtggggaggatgtgtggggtgccataacctcgcattggtccgtgcacagattttggaccagcgtcttggcgcataatgtcattacataatcctgtcgaggctaccagcgctgtatcttttatatggcaactatatacgaaaggtacatgagcacaacatcgaaaatagtacgcaccgctaagtgtacattcatgctagtcacatcacgtgcaacacttcttttacggcccgataacccctcttacgtctgtgtttggtttgacctcagacttccgtataaatgatctttgcatttcaaattcccagattcttccatcgcctacgttatataccttaagaaaaagccgaaagcctgcgtacattcaatccaaacctcatcgctagcatcgacttcaatcaaaaaccatatggcgtcttccccggtgccctctcatgttatccacacgtccaaaggtccgaccacattcaggacacacgacggagcgatgtttgacatgctgtattttgatatggcgcatcaaggttgaatggctgctaaatgtcgtgtggcttgtgcagccctgccagaggcatctgaaacggccgtcggaactgaggtaaaaggaaaactattaactattaagtgggaagagtgagaaattctgactcacactcgtccctggtcttcaatatgagcagaggttgcttccacgtgagcgacttgaatgttggggttccgaattgtggtttgaccgggacggagagagtcttcagctctatactgcgcggtcgagagatgcggaggcatggctcagagaatgtttgtaaagaggccaacctgtagataataccggtgtctgtccggccgcagaggcaggtggttgcgtagtactagaaggtccaggatggtgattgcgttgctcagagccacagctaagctgaagcattcttctcatacttcaatcatcgaggtcagaagtgtattccataatagaaaagaagaagtaaggtagatgtctatactaaaagtgagttgggtgctttgtcttaaatctgccaggaaataatctgtccagtagacatactgtcaaagagaagttaaggttaaggcccctgaggtgggtccatatttactccgctccctccacttcctccgctcccaaagtctatgagtccaaattcaggtaacaaggcctcaatacccggttccttggcgaggggggtagttagctacatagctatttagttagttagtcaacttactaactatggtagatgattaaactactgccaagcaatatcaatgtacattcagatatgatcacgtgatatgccatgtggtggactggacccaccttcccttttaggaagtaattattcctatatatttcatagcaactccttcctcctaaccgacattccccccagtggctgagtgtgttgacacgcgtttaaaatgctaggttaggtactagctgtcagcgttcgacccacccagtgcacggtcataaatgttccaattacgctcccctaattggcccaccttgcttagtcgccggtcaggacctccagtaggtccggcaatgtgtgcgcaggtggggacgactagatcttagggtaaagatggttggggttacttaagcattatgatcccctaagtggcgacctgggagtataaccccaggcactggatgggaatgtccttttttgccttttttttcccttctactttcctctcaagtctatctccaaaactctatgcctgccgctcctctcccccacaaagctcattgacgcttactttagatatctatcatgaaagcagtattaatactatccaatgagagacatagtcacttagtcgcccgtaatagttaactagagatctgtttctaatttatcttagtccagtatgtatcgagcttgtatttttgtactatctcttctacattgtactccgtaccatctaccagatttctatgtttaaacccctccacggggaagcagttgaagcgagtcccgtagaataatatttgacaggagtgacttatttttgttaggtgtatacatacaaattatagatacctgccacattgattaaggcaggagcggtaccaaattaggaaggtgcacctaagatttcatccaaaggggggagggggggagagggctcgccatagcacagccctatatattatgtatgtgcagaagccaaaccaagaaaagaaaatcgacaaaaactccttttagggagacagacgaagggcccagatcactatacatatagactctctctgcgtgtacacaaacacacaatcccaagccaagacaaggctcgcatgcaatatacaccgggtatcgagcaaaaaacaacagcaattcatcgcaacggatcataattctgcagcgttcgcagcgttcgcagcattcgctctgcactgcttgctcatagtataaaccgcagtcgacgggtagcctcagccgccacgagagcacttattgccccgatgaagagacatatggagatggcgttatacctctccttgtccaggttcatccactgcgtgtccgaactgttgtcggccgcgggctcggcgcctggttcgaggaggctgaagacgatccagctgatgaaagtgccgacgaattggggtagcgtcgtgtacacattcagcacgcccaggtagatgccagccagttctcctgttgacgggatgttggaggcgcggtcctcctcgtcggtgtcgctgtcggtggaatcgtggtggttcagtcggagaacgtccagctcggtgtcggcggcggagttgcggaggctggcggaggtgatcattgtcacgccggatcgtgaggatgggattgcgggggaatagccgcccattgttagtttgttgatttccacgcccatgaaagcgaagggggcccagccgctgattgcccaggggataccgcatactgctactaggaaggttgcgaaggcgcgcgagtgtgctagaggggcgaatatcattgtggcggcgaacacgacgtgggatatcagccaggcggtttggaggtctggtcggattgcgctgatggctttgagaaccgctgcgacctttggcgggggtcgtgcggtgaagcgtatccgcttgctatcgggctgcatgatgcaaaagggtaggagtacagagctgaggactgttatggatgagaagaccgttaatgatagactgcccacgcggccgacttcaccaagcatatcggttgctttggccatgtcgtcttttggtacttcataacggaagtatgtttcaccaacccaggttgtgctgtagaagaggaaggggaaccagcctagttaatgttagcttgctgatttcctagtaaatgccgaatttcataccaatccaagcccaaaattgggcccagcaaattgcttgaatgcgaggcggcagttcgaaagtagttttgaacagctgggagaggacctgaatagcaccggcacttccatcatccctatcccaaaacattagttgacgacaataattatcggttcgagctcaactcaccttgccgagataaggactcgctcttttaccgagtatgaagtgactgccacagccaacaccaacgacaaagcagcgatcacagtcatctgcttgaactgcgtatctccaaggaaagtaccaaagatgctcacggtatcgatagcaccaaccacataagcaaagagctggccaatggcggacattctcccggctaaagaaaggtcagtgtgttttgggcggagacatatggggaagcgccataccccatgcggacccagcttgttgcgatggaatcggtagcgtatccacaatcagaccgcgacagcatgcttgcactaagatattgtaagctaccttcaattagtgcgagtacatgtgccacttaccaacgttgatggagaaatccaccgcataaatactcactacagccagggcaattgtgccatttttggcctgtagaaaaccaatattagcttccacgtagatagatttagccaggtgagggttccgataaacacgatatataccttttccgggtcttttacaaataaaccaacaatctctgatgtccaccctaagacaagcagacagaaagcgacaacaaacgagccaaagatcatgaaaggtctacgccgaccccatttcgatcgtgatcgatcggcaataactccaataagaggctggataatcaacccagataacgggccagcaatccacaccaacgaagtcttagactttgtcagaccgagctgaagaaggtaaggtgtacaatctagcagcgatcaagtcagcgatcataccctaagcacctaagcactattcggaacgggatgtgaatagctcttacaagtcatctcagtaccccacgtgaacctagaaaacaccaagtcagccacagacacaaaacaacgatccatggaatcctccaattgcgattgcgattgcaccaaaaaaaaaaaaaaaagcaaagctagacaatggaatgtcgcgcaacatctacatccatatatccaaacgccgaaacagagagggacgatacgcactgcaatccgaccaaactaaacgtcaaaagcgccatcctcgtagactgattccgacccttgatggagggcgtccccgcccatcgcgcagcctgcggcatcctgattatccacgcgctagcacgcactcaacaggtccgcgctcatgcacctgcacctgcaccaaacccagagtacgctaatgacggcccagccagtgacagaataccgattaccgattcgaaagtcgaaagcgccagacaggaagctcgtcgcgacgcgcaattgagaatcagacaaatatgtagaacgtgcgatgcagcagttcaggttcaggtgcagtccgggaatacgttccgaggaccaagaaaggggccggcagtagtccgctcgtatcggagaattaggaattgagtcgcgtgctcttttcggggtcagctcgcggggggccgaaacagcgcacggtacgtcgcgggttcgtcgcgactcgcttgttgacggcgcggagagcggggaggatgcgtgggttgctccggggtcgtcggtgggcgtctatgtcgtcgaaaggcgcctatggtggatttcagaaagacgttgaacagttcgaaggagaaggagagaaaatcggcgttggcctgagcgcaacgcctctatgcgggccccggccttatcgatttgattaatttacgagacagacccgctgggcttcaagcccttctgcagatccgggcttttttgttacgacagctagggtcgagggcgttttatttgttgtctgtgtacgggttctgtttccactttcaatgctttaggtttctttgctctccagttattgttgtttgcagccaagggctgggtcgccttatgtcagcctctgggatggaccctttgtcgctgattggcccgtgtggtgacgtaactcagggccctgtgcgccaattttagaaacacaggggaattatacgaagatatacgaagacacgggatatgacaatgtgcaatgtacgtgcattgggcaaaagagctacaggggctaatttgatatcgcttacctgacaggtgtacttttgctctacgctgtacatattgaaaaaaagatagaaatatgtggatgacagctaatcttatagcaatcccaagataaagggacatatccaccgaacaaaataagggcgtaagtatctttcttgcgttgcatccaattctaatatcgaattggtctcgaaaacctaagtatcacagtatgacgcgactcctgcctgccggccgaccaaccaaccagagtcagaaaatagagattttaattcctttgtatcccaatccgcttcccataatcatcgtaaacagctatagtccgaaaacctacagccggttgggggccgaggtggtgacgggccactggtagccagcggcgtcgctgaacttgtagccgtatgaagcagtgaagtcatcaagaacggcgggtccacgggagcctggaacgtgaattagctagagttagaaaagaacgaagagggaaaactcaccgtaggggtactccatggggatgatctccttgttgtcatccaagtagtgcaggagaggagtgaagatacgccagctggcatccaactcatcgtcacggacaaagttggagtggtcgcccttgaaggcgtccagaatcagggactcgtaggcctcggggatcttaaggtcggagaagcgacggcggtaggtcaagtccagctcggtaaccactgtctgcatggagagaccgggcagcttggagttcatcttaatatagacggactcgttgggctgaacacggatgacaagctcgttacggggaatgtccttgaagataccggaagtgacatccttgaactggatgcggacctcggtcttctgctcgttcagggcctttccggccttgaggatgaagggaacgccgtcccaacgctcattcttaatgtatgcaaccagagcgcagaaagtcgggcaacgtgaatccttaggcacagtatcgtcctcgaggtaaccgggcttgctgccttcgagggagcggccgtactggccgatgatgacgttcttgggctcaatggcgtccatagcgcgaaggacacggaccttctcatcacggatatcctcggaagagaaggaaatggggcgctccatggcgagcagtgtgagaacctgcagcaggtctatcaaaatgttagcatctttctatatctattcagtatgatgaatgacttacggttctgcataacatcacggataataccgaactcatcaaagtagccgccacggccctcggtgccgaaaggctccttgaatgtaatctgtagccggtattagaaccggaactccggactgagatcgcttcacatacctgaacgttatcgatgtggcggcggttccatgtagcgttgaagaactcgttgccgaatcgcagaataagaatgttcttgaccatctccttaccaaggtagtgatcgatacggaagatctcctcctccttccagttaggctccaaagccttctggaggtcgcgcgagctctgtaggtcctttccgaagggtttctcgacctataagaaagagtaggcgtatcaatatggggttcgttctagccagcttgtcccgagaaactcacaataatgcgagcgaggcctctcttaggatagcagttgcgcttcagctgctcggacacggtggtgaagacactgggtggcagtgccatgtagaacacgcggttctgctccttcgattggcgtttgttctcgatctcctcaaggtgcttgttcaggttgataaaacaatcatcttgatcatattggccggaaacgtaggaacacatcttgcagaactgacctaattgatcctcaacctcctttgtgggaatcttgatgtacgagcgaacgcgcttgaggtactcgtcgtggtccatctttgtccgcgcatatccgacgatatgaatgtccttgggcaggaatttgttgcggaactaggtcatacttgtcagtggataaccggtggatgctcagtagaaatagcacatacaaggccaaagagtgcagggaactataagctggtcagtacgtcaagagtcatcaccacctatggaaggggtacgcacggtcttcttcttcgccagatcaccggatgcgcctagtaccacgatgatggtatcatctttaagttcgacggtgctgaatgccatctccattgtcagtgttgcgtttaattgaccgagaaagaattttgcattggacgcggaatcgaggggttgagcgggggagctctctgggcacagaaattctgcagaagcgttccagggagggatcgactatggggaagaaggcaataacgtccacaatagcacaatgttgaggggataagttgaggttgaattgagctggaggcagccggtgggcttccgcaaccgtggaaagagtgatgtcagagacgcaagaggggaaactcacccagcaccatggcggtcatcggttttgttaatcacagacatcttgcaccaaccgcctaatacacaaagtgaagaagaagagtcgagcggagtttaaagagaaagagaaatattgtagagaactccaacaggaccggagtacttttttaaggaagttactcacacagcttcggctggtggggctttggctgggtattgatgtattttatgacttcaaatacaaaatggttttgagtaatctacttgattctgatatttaccatgactatttcgatgccgacctaccctagcctcgtggcgaattcagtcaattttcttatatcaagttctttctgacagatcttcatggtcattctgactgaaatctagcccggagcttacccgtgatgactatcaaccccacgcctactatcagtctatacaacatacagaactgattcggcctcggggtaatacaaagtacctcgggtcaattgtcgataatatcggacatgagcctgccgctaattcttattctaataacagatctagaggtcatctgataagaagtgcggtttactcctaaatgcggatctatataaagaggctaaattcgaagatagagtaagacgtgtccataacactgtcctatatttatgttaatagtgtaagtagttactccggagttactccgtactgttagttatagtatgcacaactttgcggtctaccccgtataccctcgtatagtatgcatgtatgttgtattcaaagcggagcagagaagctatcgcatcagggtaaggttgcagtgtccactaaaatccttcagtgtatctaacgaaagtactgcgtaccaaacacaatacaataccttcgagcacgcaacttgataagccttcgttgtaccggtgacccaaatcgtgggggatggatcggcaggttggtcatttggacttttggacccagacggattctgttttcccgcgagaggccactttcttaagtccggtttgggactggtattaaccccatctcgaattcttcccaatccggaacatactattaaccgttgctacttagggctatacgaatattatacgaccctatctacactctacgcgatctgttgtctctcggtctcttgaaaattgtccaagttttcatgaatacatccatggatacatacggtcccaaatgtaatcgcggtggggcaggatacaggaacttctagatttcccaatcagtggtctcggtctgggtgaagtatatgatggaccggaacgctacccggatcatgtcactgtcactggtgatcagttggagatatgattgtttcgatgttgtcaaggacactggctaggttggataaaaacaattattcactccctagacctgccgacaataccctctgcaatttgctttttcctggatgaaaccttccaactttgaaggttggaaccctgtcgtcatggctggagtttgtcagctgggaagctccaggcttgaagcttggacgtgtcgttcggactactgtagcccgagtggcagtggaaagtacaggcggtaaatggtcggtaaatgacctcgagggcgcggagcggagaaacaagaatccccaagcttatctcatctcagattttgcctatctaatcgctgatgtaatagagcggtgtggcaatcacgggatctcgcttagccctgatgcgtcacgtggtcggtggctcgctaagatcccgtttgggctagggcgaaaaccaacacacggctgcccaaattgattgtgcgcctgactctatcgaagcgacgacaaccacgacaaacgggaacgacttttgatcttgcgggtcattccttcgactttctttccttgcccgctccccacagaaacgccgacacaatgccttcggaacaaggacaccgccgtgagtgaatccctcgatgtcttatcgatcgtcgttttggcggtctcgaaatcgcaaagccgcattatgagcaggcacattgtgtggtcgcacactggataaaagacatatatgctaacgatttcttcttttctagtctacgtcaagtaagttaccaccgcacttttatcgcattcaaggatacaccagttcgacatggaggaccgatttgggggacccaagacatcgccactcaaatcgaagcaccatacgatatgaacagagaattaatacgagtttctttttacaggggacgtcacctgagcttccagcgcagcaagcacgccctcacccccaacaccaggtatctacaccctgcgcacccaaattgaatgctcggatggaaatctgatatatggttatacagcttgatcaagattgagggtgttgatgacactaagtccgccaagttctacctcggcaagaaggtcgctttcgtttaccgtgctaagcgtgaggtccgcggctccaacattcgggtgatctggggcaaggtcacccggtcgcacggtacgtgaatacaacagacagttccatggccatattcgaatggtcctctgggagaaacctcgaactcgaatttcctgtatctgactctttccaggcaactccggtgttgtgcgcgccaagttccgcaacaacctcccccccaagtccctcggcgccaccgtccgtgtcatgctctacccctccaacatctaaacggcttctttgtgttgttttcagtgggcgattcccttcttcgcacagacggtcggtcaggcaaggaaaagtcgacggaacgagccgatgttgatttgaggtgatggagttggcgggtggataacgttttgttcatgggagaaggcagggccaacaaagccctacgaatcaaaaaattacactttcatagctgtgtcggcccaagatactgggaacgagcttcgtctcgatatttctccttgttcttacaattggcgagcatgatgtgtctggtcgcgcagcgtcacttctcccattttgtatctgacgcttaaacgcaccaaattccataccatttcaaatttcaacagaccggtcaatcgatccgcttcttcgtgcgtccggcttccgtttttttgttctagaagaaattgcatttctgctctggctccaaattaccatggcattgttgcgaattgttgcgaatataattatactccatggcaacagataaacagacaaacagctcgtattcaaaatcagtagctctagcactaagcctgtgtggctagatccctaggttgatgtggatacccatgtcgaactattatatatcgattcgaggttataattctacgatgtaaagcaaaatcccaccgatattctcctttttattgtctcaataaacccacaagaaaaagatgtacaaattatataggccaacataaaacccgatccgaactccactttagccgaagtatatatctccaagtatgcaaaacaaaccaagtatcctaaaccgaaatgcccaacaccaaaattccatcataaatcttacaaactctccttatgaaccgcctgaatatgcgccttcaaattctcccgtcgactcgaagcatggggacaccgcggacacttgaaagcgcgcggagtgacatgcagagtctcgatgtgtcgcatgagcactcccttgtgcgagaaaaaacggtcatatcgacagccctcccatttgcattcgaaagtcccgtgatcattgccacccctggatgaagcgaaacacgtttagaacattgattacgatagtccttggaaagaagaaaacgaaaatacatacttcttcttggctgcagggccacgggattgacacggcattttcgtctggctaggctctatgctggcatcatcctgccgaagcggctcgtttattataggtgccgagacggggagatcatcccatctggtgccgtacaggcttgctggggagtgtacggcggtggttgcttgggatgaaatggatgtcgggctgtgattggtagaccggctgtgattggtagaccggctgtgattggtagaccggctgatggtgcctgggtttagatataatggggagggagtgagagagagtattctgctggggataaccggtgtagaggggaaacatgaggaggcaaaggggggctgtgccgagggaggttgcagctgatagttgtatgaaagaggttgaggggtgatcgctctcgtggtgagcgatggatcagtggatggagaggtgagaagatactcgtctgtccaatcccttaacgcaatgtcagaccacggaaattcggactccgagatacttgggatgttgttgcgtgttggccacgccatcttgcgtacaatcaccgatctgggtctggatgtagagagtaagcgttggggaggcagagacaagatctagaaaatgctgagtgagtgtcttgagccgatgcagcatggagtatttatgaaatccgagccgatgtgaattgtggtatgcagcggtcaacttcactcgacgtcacacagttgggagacgacacctataaaaaaggcctggggaaagtggcgcaaccagttcggccaaaccctaggtttgtactagaaaacctggcttagatcctataacgccaggatctagatccttgcatcgactccagcttcacatcagatgagacaaacgcaacctccacgaaaccatatgatcgtggcgtttttagcgggctgagcataaatccccgggtttctgggctctcaggctccttggcagggaactcatcatttttattggtgaattcttagtatccgtttcagaaagtttctagtatgttgggaacaaaagcgacagaaggattactatcatttgaaagtattatcatgctgcaagccgtggccaaccgtaccaataggatgaggttgcagccaggctgactgggaatatacgagagatcggcacattatgatgtctattctcatattttccctattcaccgtactatttcccgttccttttttttcatgcagccggcccatgacaatggcaatggaagatatatccggaaagcctaaccgtctactgacagggatcggggtttcattagcacttggggcagttgaaagtattaaagttaagatattatcactatttattccagggactctaatttagctgtagccatagcataacgagagaccaaagatccgactttctgtaaagttagggttacaggaactgtgcaggacgccggtacatacatctactgacccgatttcgtatcccgggatatccccaaaataatagagaaatcctcgaatattagggttaagcactgagtgtgacgcttgtacatacatacactcgatgtggcgcagtttaattgcatgagccgacccgatttcctgcctaatctcatcatttcttactcccaacgagaatatatacgaggctgtgtctatgcgttgacatctacaactgttacttgccagatgttcccaataaagagtggattcgttgagttttatatggatactggtagacaaaaaccgccgtacacgtccaggggcgagggttgggataacatcaccacacaaacaagagagccaatttccttgcgacctaccaaacgcacgaccaaattccaccataagaaagcagtaagactggaattggcctgaaagggcagacgaacaagttgcaatgcaaagggcgcagcaaggttcctggcggttgcctttggttgccttaccaatgatatcaaggctaaggtgatggctgaaatgggtccacacctccatgcttatcctgaccagaaaaagggcggaagcatctgtttcgtaggtgtcaacaagcttgacgcccagatggcccgggagattttgaatgatctcctgaaactcctttgtcgcgtccttgtgtcgaccatcgagagttagactgacaaggatattcttgtcgcgaggggccgctctggtagcgacatgggattctgcttaccgggtgatgttgctcttttcacaaacgccggggcgattgggtgtgacccaccctcctaaggagtgataaccatgttacgcgccgggcttttataaagaaaagagtgcactctaacgagaacactaaacatggggaagagaaagaaagaaaacggaactcaggacaatggtggggtccttatgcccctgcgggctttgccatactctcgcttgtccattgggaaagaatgacttcccccggaaaggaaggaacgatcgaccaacgacctcaaatgagtcccgatcatgataccctaggggaatatctgggcgctgttccctagaagcccggcgcctgagcgatgtctttgaagactcgatatactgggtcgggataggttgtccctttgttcggctcatcggggggagggagtgactaccttggccaagctctgaatcagctatggctccattcgcgtgctcttcggtagcttgaccaaagcgtcgaattgaggctgcatctttcgattctaaaacgcctttcatctcaggtccgtggtctcattccaggatatcttctgcaagtctcaaggttcttggctcttgctggtccaattctccgcgaaacccaaggggtcaaaatgtccgaaaaacagggcgtgaccggggggaaaccgggttcttgcatgtgctgaagctattgattttttctttggctttgggctcaggagcccgacgatagatctttcctttctaagagggatggtgcttccaagaacaagtctgccactgttgaaattgaccttgactcccacgccgcattgttatttgccatctgcgtgacggcagtggatttatttgccggtcaccacgcgagctccgtatttcttggccgggccctaacgagggcgaatccgtccatagaatcggatcggtgaagccagcggtttggaccatccatgaaagagtcgcagagagtgatttcagatgagatgaaggttgatattgaccagcaagggaccagggattggacagacaaagtatctctcttgatcaccggaaggagtcatgttggcttatccctagcaaaacaaagcctaccagcaggctgaaacagtgatacaaaaagatgttgattttctcactctctccaatccctgatcctggcgagcaataagttacaggcccgatgaagtttgtgcccacacctcatgtacctacgcggtaacatccttcttccaggtgttcttccaggccttcgaatttgcaccaccactagcaggcactcgccgatgatgacctggtccttcacaagaatggatccctcgaataccaggcaaacagccaccagttgagttccaggccccgttttctctcgaatcacgctgccgtgcctccgtaccacggagctgatgaaatttccacccttgttcgtgcatccgatggtctgaaacacgctgctatagtcctcggctgtctccattagggacgatgtggctatagtaactgtgcgtattcaaacccagggtgccatgattgattgcttgtggtgagaagggaaacagtcgtggtgccgggagctgatgaacaggtcgattttccagtccataccatagtaccacgatttcgaacccctgccttgactccgacgatagcgaacttctcggggaagttagtctgctataacgatagccttcatatcggtaccaatgctatctcccgccaacgcctgcgctggtgctcggttcgagcttaccaagtgacgaagccttctccaaaagaatctgaccggacgtccacgattgcaggagagcctcatgaccatctatccacccgtgtgtgcagccatcactttgtcactgaagaatgccttattgggcgacgagcgaaacggagacaggagacaatgcacatcgggtggatgtactacaagggagttcagaagccaaagtaatgattcgttcaccacttgctcgtcttttgtttcttctccgcgatctccacatcggccgcagctgcagcggaaacaacggatcacttgctgtagctgcgacttccgactctagcgtcatgcacgcacttgtgggtgatgctggtgacaaacgcatggatgaaaagtctcccatcatgcggtgtcgtcgacaatcaaggagaaggtcatgttctgcgaaccacattcatccaaggatcaagtcgtgtcttcctgggtctgcaaacagtatgtgatgttgctgtttgatagggtgagaatgatagcgtgcgtgctcacgtccaatatatagcgtatggataagcatcaggtcttgggcttgaactgcagctgtcgagttattgtcagttgaggccaaatattagacagcaaaattattcaggacgtaccatgggtatcatatggtgatagatgcatccgcccatcccctattagaaggaggggaagaccggacattgttgcagttcttgcgttgattcttttcccgatcattgtgaaaggaatccgcggcaatatttggaggaaggctgagtataatgataaaatataggaatcaaagccgagaagtcattgatcaaagttctcattgtatttatcaggcgatcggggggtgagaattccatgaggcataagagaccagataaccatgaaagagaagtgagagagatatacccagaaatcgaggctcaagagaaacctgcctgctgatgacctgaaacgaccagcatcgtatctcgagacccaagtagcttggagatataacggtgaagtgaaagaggaagaaccgtgattgagctcggctgatgcgaggagggggggatgggagagagacgtgactattgctttgattgtttgtgtttgggccgtttgaaagcatttgacaaaaattcacaatgtccagctgttgctgtctcttttgcgggaatggcatctcggtgtctagcaaacccgctttctggggggtttacaaaaatcgatgaacagcctcaccattaaggctaattgctgggcgtccaccagtgcatggtggttacggcccgagagatgaggcataaacaggcttcaacaaggtataagaaaggctggaggtgtaaatcagtgtgctgtatgggagagaaagggggtcagaagttgttgaataactcacttttataattatagagaatttcctcggtataagtcaaaaattggtggtcatctctatatcgcatatcttcaagatcgcctataccaagcaatatagcagcagttgtatggtttggggcgacttcaatccttggagaagggaggttgaaacgccaccaacccgagtacatttggttcgtgacggtccaaactgccagattggcgagcaaccataggttggaggtgaactgagaatcgtaagatcctatactacaggagggctgttgaatgcccaagataatataatataatataacatggatgtgcagtttccatgagttgaaacttctaagatattgtcatgtacttatacagctgacaccaggggcaaatggagcttgataaagaagacacagtgatcaaacctggtatagaattatatagattttggtgggttggctttatttattatacataaaggctcaatttgcatcatgactcatatcaaacagtaacaaagaacaactccatggcaacccaagtgagaggcattgcgactgtaataaaaattaaatagatatgcattaacttttaaggagaatgtgtgctaagtaacactcgcggacggggaattagtaaggtatccagagggagagagattaggcctcgatttcgggcttcgagtcagcctttcgctgagagtcgataagctcctggcgggcacgctcttgctcagcaagaccggtcttctggacggtgtgatggcgggtcagctcacggcggcgaactaacaaagcgagaacgaagccaaggcaagcgatggcggtgtagaagatccacatgcggttcagggcatgtgtgaaggcttccataacgaccttgcgctgggagggagtaagcctcttgataagggcctttgaagagctgctaaaggaggcagaaacaattgcagcatcttcagcgcctagggcggcgatgagcttggctgattgttggctcatgatgttttggtaaatgacagtgcctagaacaacggacatggaagtggaaagttgacggacaaagccgaaagtggctgttgccgtggccatgtcggcagggcggatgttggcttggaaagcgaccaaaggtgcctggaaattaggaccaataccgataccagtgattaactggtagatgatgatacggggccatgaagcgtaggccttgaggtcaatgaaaagtccgaatccaagagacatcaaggtcataccgccgatgatcagctcgcggaagcgaccagtcttcttcataacgacacccgtggccgcggagccgattgcaagagacaacaccagaggcaggacatacacaccactcagaatgggagtcgcttggaggactgtttggaagtaaagcggcagatagtaggtagcggcgatgaaagcgaagccgtggcagaaacaaacgagcaggatgagaatgttgtaccactcgttgaacagtcgcgggggaatgattgggaacttggcaaccttccattccaggaacattgccagagcccaagttaacacaccgaagacaattagacagatgacagtaggtgaggcccaggggtagttgacacctccgaactccaggccgaagaggaacatcagcgtcccgccgatgatcaagaacgttcctgtccaatcaatgcagcgcagaccagcccagaatggagtcttgggcgattcaatgtgaaggaagaggacaaggatagcaagcgagacacctccaaccggaaggttgagatagaaacaccagcgccaagtcacttccgtcgtgaaagctccgccaataacaggaccaagagcgcctgcgacggcccaggttgcaccgaaaagaccatagtacatcggacgatctctgtatacaagttagcctcgttgcatcccagaccaagaagtcatatcatacctcaagctgaagagatccgaaacactgatattagccaggataatgataccaccaccaccgacaccctgaaccgctcgaccggcgataatcgtggccatattatgcgccaaagcgcagatcagactgccaaccaggaagacaacatttgccaagacaatgatagactttcttccccagatatcactgatcttaccccacagagggatacaggcggcattcgccaggagatatgacgatgcgatccatgagaaaccgctctccgaggcaccaaactgcgcggcaatagtgggaagggcggtggaaataatagtctgcaagatcaacgttaatgaccgaagcaaggggaatcaagtgagcatacacataccatatccaaagctgccaagaatagagccaactaaatacgacatcaaattagctttctgcacttcacgaagtttccccgcctcggagggtttcttacacatagcgccatcatcacgacaatgatctttttcttgcccatttttgctgcctgggagggtgcgtggtctagaggcgcaccctctgttgtcttttccgttaaattctcatcgttgtgttggccagctacctcagttacctggtcgggggtatcgggggacttttccgtgtggggttgatcgatttcagtattactgctcgaggcgtctggttgctggcgctcactcatcatgatttgtgggggaaaagaaagggagaaaaggtttctagaaagaaacggcgttaagagtccgttccgtccaagctaagaaatgtccgaccgcggaaaatattttttggctgctagaacggtagaatcgatatgatacatatattataaaggggtcatcggatctcgtattttcggggtttcaaagttgaaaggcgaggccgaagtactaaattgtcgaatccagtggatcgtcggtgtcggcgctcggataagccccgatgccgagcttcagggcttgtttttacgaaaacgtgagtcattggttagacatcttgttttacgagggccaaaaatggacaaatatatttctaacatatcgctgttggatggggtggaggctgatcgcccttgttgtcaatttgaagtggccatctccctgatcttcgacgatagagacatagtataaaggagaatacttgcggagaaatatctacgatgggaccaatgcggtgcgaagaacacgtggttgtcatttgagagagagccagctcgcagctcatgcagagagcctgaccgactttcagatttaattagaacaaagtgcaaaccatcagaatcaactcgcaaccacgtgagataggcagctggcagcccctagtcatatctcgacacgacacaataacgatgcggtccatgagaaaccgctcacagagaagacccaccatttaatcacggcctccactggccaactcagagagccattgccgatgttgaacatgagccaaagcagcgaagtagtctgagagctcgtggaattgtagttggaagcgtttctttagagccagtggattgcatctgggaaatctcagaccatgcgatttcgatggcgatggcgggaataatgcgaattattaagaattgaaagagtgttccaatatcgtgtccatggccttccccgggaatacgtaatggaatcactccacgccgcttcgttttaagcggcaaccgtagctttggatactcgcatgacgctgccctgatctataggctatagcttcaatgtccgcgaaattgaagacgggagcggtaagacttgaggcagccaaagcttggaatctgacgttaataattcgctcgtgggtttgtgagttgtgtgtataaatatcagcacacggacgatagccatggaattccgcggatgtcgcgcattggaaagggtgtagaagatatattccttggggaagccacgaacggtaactcggagggcctgtctttgacaccttgattctcacatttggtgacccaggagagttcgcgtcgaatgcgatttataagtatcaaaaggcgcctaaccctaacgttagtcgctcatcgcgttcttggggcctcaagatgatgccaaactgcatagcactggaggtacggagtaactacgcgagatcttggttatcggcggggccagagatgacgctagacctaaaagaggttagcgtagctttcatgtgggaataggtcgggcctctacgtatcgtaagcttctaaggttgcgatgcgtgatgacaatctcaccgtccaaggcccccagggctccctcaccttcgattctaactcgagtccagcactcagcttgggccatcttcagtgcggagctcatcttcaatcatggtacacactcagagccttcccatagagctcctagatctcattgtctcttttgtccgcccagatgatgagcttccgagcagagatcgaagaatgaaagacgatattgaaactctgcgcaatgtttgcctagtttcgcggaagttctatgccctgggccagccgttactcttccgtgttcttttttatgatggttcgcatgattatcgaatgtttaccagaacaatttgtcgtcgtccagatcttgcaaagcatgtgcatcagatctgcatactgcctaccctatccttcggtacccaccttcttgacgcagaagacctcgagctgtccaaaggcataatcgaggaccttcagttgggcgatcaggaggacacatggatttcgtctatagagggagccgacctcggccttttcacagcattagtagccagcaaagcccccaatcttcgctggctacatctgccagtatcccaattctggattcagccattcatccagctattccgccacaatcctgaatttttgtcaaaccttgagtctatctggattgaaagcgatgaagaatattgcaacacggagatgtattccagaatgaacattgcttcctatgagaaattcctcacccttcccaaggtcaaatcttcgacctttgagtacggtgttctctgcgacgcttaccttcgtccgttcccatcttcctggctgcctggaacattggagacggaaagactggcctttcaccactgccaggtcgatcctttcgccctcgaaaagctcatgcaagcgtgcaagaagctaaaagccttcacctacaacaatttcagcttgcacccgaacaaccgacgaaatcgtgcggaaaaactgcccgagttcaacgctaagcaggcctacgaagccgtcctcctacacaaggacactctcgagctcttccacctggagtacggaacgaaaccaccgcatattgatatcttcgagcaagtcctttctggccgcgtccaggttggctcattccgcgatttctccgtgctcgagaccatcgtcatcacacacgcttttcttccaccacaccccgaattccccagctcgttaaagacactccatatcatgaactgcaaggcatctgtctgggaattgacgcagagcatcgcgaaagattgtgaaaatggtctttatccggagttgactgatgtcagcgtattcgcaaccgacatcacaaagcctgctaagcttcaaggaaaacccctacagcaatgtctccttgatctagaggagatgttcaaaggaaccaaagtgaatttccaaatctcaccgtatgaaataccttattctgatgattacgataatctcgacctctatcgttcttacactgctcaggaatgatgatgtattgttctactacggcagccgtttttaaaatggcagccgggccacatatcgactagcattatgatcgagttcggttatgaggaagatttccaagaacccgccaagagcgaatcccagctggatgcaatccgaccacatgttttggattgcttatggagcgggctagggtggacactaagcctcgatgagatcatttataacaatacatgggaaacagacagtaacgaaagctcgatcgtctagtccagttactccagccattgattctgttataatatccacgataatattccttatcatgtaataatatctctgaccgaccatgtgagttttaacattttttgagggacgagtgtatgccttatttggagagatggccaatacttgggaaatctcaatgcattcatgttccacgcatattcgtggctcgatgattcctcgatgaacatgtattggccagtgttctggaaattctatgacaaaagcaaattggggtttgggtataatgaaaagagccagagcgtagagagaacatcacgactaggaaaaggaaatcgagagtaccacgtatggtaatggagcagaatgctttactcctgcaatagaagaatctctgtaaaaagcgatttccagttagccactgatccccaacaacacaacagacaccaaaacctaccagtcaaagcttcttcaaagcttagggtgatatacccatcccgatcatcatcataccgcttgaacacatccgtcatacgcttcagactgatacaagcctgaacgaaaagatcaaagctcataccagtagacctgtagtccttaggcgcattgctcatctgcttagccttggcttcaaagacaccaaagataacagaaatgaacttcccgctaagacgatatccgaacgcaacaagcgcgttctcgaactcccgctggctgatgcgtccactgcggtcttcgtcaaagcgatcgaacagctcccgccatgcagccagataccgccacagtgagacaaactcgtcgaagttgatggtcccactgccgtcgcggtcgaacatccggatcatcagcctgaccgtccgcgggtggaaggacgtgtagtcgccgttcacgagcgcgctgccgagctccccttcggtgagggtgccggagtgggacgcgttcgcggcgcggaagagggggaagagttgttgcgggtcatcgctgggtgctgtcaatggcggtggggcgggcgattggggaggccgcgatgagggcgggggtcggttgcgctgggggtgtactggtggggggccgaacccgtagttctggggtggcggggaggggtggagggggtgaggacgagactgggactggctgaagtgttgacttggcgggggcgcgtttgttgccgaggggcggccgctgtaggagttggagtgggagtgggagtggtaaggctgggaatcaaggcgtggaggcgcggaggcgtatgcgtgctggggagcgctagagctggatacaggaacacgtggagggacaccgctgtgggttccttgcggtgacgggcgagatgggagcggtttttgggtgtgactcggagtgtggcctgatacactcatgttgcttaacatctgcgccgcctaattgagggttaacgaaaggagtctaaggcgtgtaacagatgttgtacctcttctggctcagcatgactaatatttcccaagtcagtaatcagtagctgcagaagatgcctagagtatgcacttacgctggcagcgcgtcggggttgtaggatttgttgtaggccatagtcggagcgctggaggtgacacaatcaagagaaagaatgcgacacaggaagtgcaaaggtatatgaagaagaagaagaataaaaggaggcacctgaaagcggagccgggggggggcattgatttttagcgcatgtgaggaaccttgtcggaggaactgcggagggtacatgacgaattgagagctacatattggtttagagggtttatactgtcgagtttatgaatatttttagtatatgagatagctagagacacctacatataagcagactgtttctattgattttgttcaatataggtccatggatttgccaggaagaaccttggaatacctgcttcactatgaggctctgctttaaaattaacaaaaacatatccaaactacggagtacatgaatctatcgaattaacgcccctagatccacctagccagcgctatgttagaactaatacgaatacgagtttcgagaagtgcgtggtttctattccggacccctcaatatacagcgcagaactcgaatccccgcgctaatacgtatagtacgggtgtaccgcttgcattgtaggtttggatagtattagagagacgagtctacaaatttcaggggcgaaatacgcgacgtaactgagattggaagaggctgagttgtgtgcccaacttgaacgccccgctccactctatggcgtacggagtacagatatccaccgcgttcacttaaccactacagaccttcaatgacagcatgctctcgcttgacggcacgctataatggatcctacttcaatgatgtcactttttgctatcacgagatagctctttatagtgcgctttcctaatgtagaacaggctaaagcgagatgggacttcggaaatttggaatttaagagaccaatgagagctaaccacttctagatatataatctatgacttctcttctcattgacttatgtgatgtgtatattatactggatataattcagttgcgggtcattgcctatatctgactacgactgctgtatattctatattgtaaacaggaagtaagcttgaaagatttcatttctcatttctcagttaacgttagcagggtatctcaaaggcaagaacgcttgatattctgcaaaaatgcgctaggcgcatgaacaaaccactcctcggtcgaacctcgttggcttgtcgtcggcgtcgtgaaatttaaacgccctggtacaggccacgagcgacgagggacacctccggtgcttgctcctcgagcacggcgatgatctcctcccaagccttctcctggagttcctcgccctctaggatagtagtcagcgcagtcgactcactataaaatcattagcaatggtcaattgaaacagggtgaaagatgatcttactcaagatatccctcactgcgccagcatttcccctgcgattcgaggccctggagggtagcactgaccagcgaacggcttccctgctcagtagtacgggcgaaaaacgtgtgcataacccaaacgatacacttctcccaccaatgagaatacttgcgacccaaagccgagatgcacagtccggggctgacagtgttgacaaccagagtgtgagtgccgtcgtcgttgcacacgatattggcgattttcttgatcacgatttcgagcagaagcttcgaaatgccgtactgcttgggaccgttgaagttgtccgggtcgttgacgtgagcgaggatcgagccatcggtctggatgcttgcgggcttgacgcgaacgaattgctggctggaaacgagagttaggtgggtggggttatcgacgtaggagcttttctttagcttaggaagtagaagtatggccaacatcaaggtcgacagggtgttgacctgtagggtctcctcccagccctcgggggactgatagtattcgcgattccaaagtccagcgttaagcaacgcgacgtcaacacggtccaactcgacatggacgcgttcggcgaagtctttgacgctctggaagctgttcatctcgagctgccacactttgactacgttgcgtcggttcgtggctcgttcgaggtcaactttggccttgttgcccttttcgatgctgcgagatccgataatgagcaactcgacgccgagattgaggattttgatggctgcttcaaagccaaggccagaagtggcacctgtcaaaatgacgatcttaccagcgaaggacgcaccttgaggatcaaggggaggagtgtactgcatcttgaggaggcgaaagatggccgccatgatggaaattgggatgcaaaaggatggaagaataaatcaaagtaaacaaagtaccaagggtgcgaggcgcgtgatgaatgttttggggaagaaaaaaagccgataacaccagggccgataaaggatagcgataaagataagagataaggatacgattagtgcagatctaccaaggtacgaaagcggtgtataactatatccgtacacggacctcactgtaacatgtcaaataataggagtatgaataactgcagatcattttgccgagtatggttcgcctcttttgtgttgacccttaccatagtgcagatcatagacgccaaccttggaagatgaacaggaataacatgtcaccatttggactgttcattcggatccccaggaacttctcatatcgagcgatatcgagcgatatcgcgaggatgtttgagtcagcaagaatactagcaatgacggcaattctggacgcaatcttagataagatgtgtcggtgttcatgaaaatggaaccgacgatatagcacgaagatagaagcgagaagcactcgaggaactcgagttgacgttgcaacagacgcagtcgtttcggcatcgtgatattcccggacagagggcatgctcagcgtgccatctatcgcaatgccaatatctgtgctttcagaatcctatcctggtgattgattgtcttgatggccatagcatttgtgatattgaaattgttccaactgagctatatgatatcagaacattcaaggcacaggagtgagcccagcgagatcaaatcccattccagtgatgatatcgcggagagaagtgatgtcaaagctaaggcgatcagtgccctggcggctcgggtcaaccacgccgtcaaaaatgtcttctatggtcagcgaaataggcatttccaccgggccccgaaccaggaaaacctggttattccaggtcatttgtgccttgcccgtggcatttcggcatcagagttcgattgtactgcacactcctctcttacgctggaagaatctgataagaatgaccttgcgtacattgataccaacgccctctagccgaaatttcgcatcctataacaggcttgagtaggtttggttgaaaccaacctctatgaccacggttggttgatgggttgtcatagggaatgatgaatgtgttcggtttttttgatctccaaaataatttgaaatttttagaacttctttatgatgaactctttctggacacatgtgtatttgatcaagaagcgtaagaaggcaatttccaacctcctcggccacggaggttgagacaaggacgagtaaagtgactgggtgaagaatccaccagcttcaatggtactcaatgcctggtctgcttttttcttcagggtccttggccgaggtccacatcatcctcggtatcagaaccagactgatggactgaatttgcacccttagcaattcgtgggtgatgcttcaagagtggtgagaaggacaaggagaaggagaaagtgcgatgtcagcatatataatagctagctaccacgtgacccccaggataatatcatcatcttccctactatccctaggtaccagcgtaatagatatctcaaaaagcatctaaatagaccatcagattgatatgagaaggctattcttgtttactacgtgaaccagaagttaaagatgcaaaagataaggtagaatcaaagtgagccgatataccaagtccctgaagatatttcctctactctatatatagaccatctcacttgtatcgcatttgtacctcactggtacgttacatgtatctcaaatgttgtgctttgaaagtgttaagatgcctcatccatcacgcagatggcgagatgcccaagaacaaacaatgcaaacaaaatcagtgtataatcagtcttgggcaacttcaacattcagaacgttcacaattgtggtcaaatccaatttataacagcatcttctttagcaaagaattcaagtctctggttttcttttctgaagttgacgcgctgatcacagaaatcagccttaaagctgttgccggagcacattattaatccacctccgccagggcttggaaggtcggaatccgcagccaataaactcgttggagcgcatttaatatcgtctatttgatatggctgccattgcacaaggtcatcaggtccatccggacggtcgcacgtggaagagtcattttcctaagggtgatctttgggtatttggctatgggtgggttaactcattgtttcgaagttccattgagccgtcaaatatcaaatactgattatgattataggagcttgatctggaaaccgcctccacactatggtacgtgagactggaatgtaaaagtgcggcactaaaacgaaacatcgtgttggttgcttttgaccaagaatcaattgactaattataccatctagaccagcgtgtaccgggctatattaatggctatgttcggcgtttctggcaggtacgtgaacccgtcatttgaatgggagactttatatttgtacattcaagataaccagactaacattgtggttttccatcaattctaggccaggtatgtcgttgactatgtgcaatatgcagacatcgcaatgtaaacatgccgagaaccacaaatcgctaacttgatctcaaagtaccgatcaccgtggcacccccgagcaaccgggccgagtagtcaccgtaatcgagcgaagcttctgggaaaccctgaacgatccggtatgttttacatacgcctcttgttcatacactcattgatataacccctagctcgctcacctagaatctgaagctgcctccacaggcaaagtctggggtgcggcgtatcacatccctgcatctcatgccgaagaagtccatgactacctcgacgaacgggagatcgacgggtacagtgcgcactatacgccattccacccgaccgtggatgtcgaaggagccgcaggatcgaccgggccctctccaatcatttgcatggtctacatcggccagccgactaacccgcagttcctgcgtgaagcagctcagcgcgagccgcagaatgtggcgcaggttatcagtgctgggcatgggttgagcggcaagggttctgagtatttgttcttgttggagaaggctcttgagggtcttgggcttgggactgcggatgttcatgttacggatttggttaagagggttaaggctattgaggctgaggggcttgcggatgctgaggagaaggaggctggactgaaggttaccaggtctttggagggcgagggtgatgagtctgatcgtgagaatagccattgattgaggtgcatgggtcaaggctttgttggtgacttttgaagttttttgtttgcacatatataggttacatatttgcctagcacaatagatagatagcgaaagaagcgactggatagatgacatgggttctttttcctaaatataggggggggggggggggggggggtttgggtatattttnnnnnnnnnnnnnnnnnnnnnnnnnnnnnnnnnnnnnnnnnnnnnnnnnnnnnnnnnnnnnnnnnnnnnnnnnnnnnnnnnnnnnnnnnnnnnnnnnnnnnnnnnnnnnnnnnnnnnnnnnnnnnnnnnnnnnnnnnnnnnnnnnnnnnnnnnnnnnnnnnnnnnnnnnnnnnnnnnnnnnnnnnnnnnnnnnnnnnnnnnnnnnnnnnnnnnnnnnnnnnnnnnnnnnnnnnnnnnnnnnnnnnnnnnnnnnnnnnnnnnnnnnnnnnnnnnnnnnnnnnnnnnnnnnnnnnnnnnnnnnnnnnnnnnnnnnnnnnnnnnnnnnnnnnnnnnnnnnnnnnnnnnnnnnnnnnnnnnnnnnnnnnnnnnnnnnnnnnnnnnnnnnnnnnnnnnnnnnnnnnnnnnnnnnnnnnnnnnnnnnnnnnnnnnnnnnnnnnnnnnnnnnnnnnnnnnnnnnnnnnnnnnnnnnnnnnnnnnnnnnnnnnnnnnnnnnnnnnnnnnnnnnnnnnnnnnnnnnnnnnnnnnnnnnnnnnnnnnnnnnnnnnnnnnnnnnnnnnnnnnnnnnnnnnnnnnnnnnnnnnnnnnnnnnnnnnnnnnnnnnnnnnnnnnnnnnnnnnnnnnnnnnnnnnnnnnnnnnnnnnnnnnnnnnnnnnnnnnnnnnnnnnnnnnnnnnnnnnnnnnnnnnnnnnnnnnnnnnnnnnnnnnnnnnnnnnnnnnnnnnnnnnnnnnnnnnnnnnnnnnnnnnnnnnnnnnnnnnnnnnnnnnnnnnnnnnnnnnnnnnnnnnnnnnnnnnnnnnnnnnnnnnnnnnnnnnnnnnnnnnnnnnnnnnnnnnnnnnnnnnnnnnnnnnnnnnnnnnnnnnnnnnnnnnnnnnnnnnnnnnnnnnnnnnnnnnnnnnnnnnnnnnnnnnnnnnnnnnnnnnnnnnnnnnnnnnnnnnnnnnnnnnnnnnnnnnnnnnnnnnnnnnnnnnnnnnnnnnnnnnnnnnnnnnnnnnnnnnnnnnnnnnnnnnnnnnnnnnnnnnnnnnnnnnnnnnnnnnnnnnnnnnnnnnnnnnnnnnnnnnnnnnnnnnnnnnnnnnnnnnnnnnnnnnnnnnnnnnnnnnnnnnnnnnnnnnnnnnnnnnnnnnnnnnnnnnnnnnnnnnnnnnnnnnnnnnnnnnnnnnnnnnnnnnnnnnnnnnnnnnnnnnnnnnnnnnnnnnnnnnnnnnnnnnnnnnnnnnnnnnnnnnnnnnnnnnnnnnnnnnnnnnnnnnnnnnnnnnnnnnnnnnnnnnnnnnnnnnnnnnnnnnnnnnnnnnnnnnnnnnnnnnnnnnnnnnnnnnnnnnnnnnnnnnnnnnnnnnnnnnnnnnnnnnnnnnnnnnnnnnnnnnnnnnnnnnnnnnnnnnnnnnnnnnnnnnnnnnnnnnnnnnnnnnnnnnnnnnnnnnnnnnnnnnnnnnnnnnnnnnnnnnnnnnnnnnnnnnnnnnnnnnnnnnnnnnnnnnnnnnnnnnnnnnnnnnnnnnnnnnnnnnnnnnnnnnnnnnnnnnnnnnnnnnnnnnnnnnnnnnnnnnnnnnnnnnnnnnnnnnnnnnnnnnnnnnnnnnnnnnnnnnnnnnnnnnnnnnnnnnnnnnnnnnnnnnnnnnnnnnnnnnnnnnnnnnnnnnnnnnnnnnnnnnnnnnnnnnnnnnnnnnnnnnnnnnnnnnnnnnnnnnnnnnnnnnnnnnnnnnnnnnnnnnnnnnnnnnnnnnnnnnnnnnnnnnnnnnnnnnnnnnnnnnnnnnnnnnnnnnnnnnnnnnnnnnnnnnnnnnnnnnnnnnnnnnnnnnnnnnnnnnnnnnnnnnnnnnnnnnnnnnnnnnnnnnnnnnnnnnnnnnnnnnnnnnnnnnnnnnnnnnnnnnnnnnnnnnnnnnnnnnnnnnnnnnnnnnnnnnnnnnnnnnnnnnnnnnnnnnnnnnnnnnnnnnnnnnnnnnnnnnnnnnnnnnnnnnnnnnnnnnnnnnnnnnnnnnnnnnnnnnnnnnnnnnnnnnnnnnnnnnnnnnnnnnnnnnnnnnnnnnnnnnnnnnnnnnnnnnnnnnnnnnnnnnnnnnnnnnnnnnnnnnnnnnnnnnnnnnnnnnnnnnnnnnnnnnnnnnnnnnnnnnnnnnnnnnnnnnnnnnnnnnnnnnnnnnnnnnnnnnnnnnnnnnnnnnnnnnnnnnnnnnnnnnnnnnnnnnnnnnnnnnnnnnnnnnnnnnnnnnnnnnnnnnnnnnnnnnnnnnnnnnnnnnnnnnnnnnnnnnnnnnnnnnnnnnnnnnnnnnnnnnnnnnnnnnnnnnnnnnnnnnnnnnnnnnnnnnnnnnnnnnnnnnnnnnnnnnnnnnnnnnnnnnnnnnnnnnnnnnnnnnnnnnnnnnnnnnnnnnnnnnnnnnnnnnnnnnnnnnnnnnnnnnnnnnnnnnnnnnnnnnnnnnnnnnnnnnnnnnnnnnnnnnnnnnnnnnnnnnnnnnnnnnnnnnnnnnnnnnnnnnnnnnnnnnnnnnnnnnnnnnnnnnnnnnnnnnnnnnnnnnnnnnnnnnnnnnnnnnnnnnnnnnnnnnnnnnnnnnnnnnnnnnnnnnnnnnnnnnnnnnnnnnnnnnnnnnnnnnnnnnnnnnnnnnnnnnnnnnnnnnnnnnnnnnnnnnnnnnnnnnnnnnnnnnnnnnnnnnnnnnnnnnnnnnnnnnnnnnnnnnnnnnnnnnnnnnnnnnnnnnnnnnnnnnnnnnnnnnnnnnnnnnnnnggcgggggggggggggtagtgggctttggtataattctggttttgtccgatcttgttattgagtacattgaggctactattgcctgggcgggaataactgtttccataaagcaagggtgcccaacgggaattatttcgcatgtgtaaatggtcgcccaaaaaatggaacattgagtagtattagcaggcgatgtctgaatttgttccccggaaaaaacctcgtggttgtaatacatagttcagtccgatacccgtgacccttgctggacatacatgccatcgaatcactacccttgatctatgtactctgtcataggaaggatctgccgtgaaacgaaaataggcattgcagatatgaaaccacacaaagagagaaagaagacatcaaaagttcgtaggtgaaacaagtcgaaacgcaaccgtataaaagctcaaatctgcgttcattaaacaaattctcaaataataaacccatattcccttcctaagaagtcgagcgcgaaggaaaataacaatatcctgtaacaaaattcaatgggcaggaccccgccgtttcatctttcgccatattcgtttgtagatcgttacttcttttggaaagatttgccaaagaaaagcgcgtatgaagaaatcgaaaagaccccatcagctaatggtaaccctcttgaggagcctgctcgtggatgtttccgcgccaacctttggatgtcagttaatatcaggatcaagataccacaataactcacctccgccaccgccatacccagagtttgggccaccacctataattaattagcaaagcaacaagaaagaagaatcaaaaactaaccatagccgccgggaccagctacgccataaccagcgggaccgctaggagcgtagttgctgtacccacggttgtagggcccaccgtatccaccggcagcggcaggaccgttattgtacccgccgtgattgtgattgtagccaccgtaaacaccaccaccaccaccaccaccgtggtaactagattgaggctgggcattgtatccaccacgaccgtggaagccagcatcctggcgttgtgggcgatcaaacgccttgtcaacgcgaatgacccgcccgtcgaatctgaacaacatatgagatcttgaactcataaaatcaatgtgaggttggatggttactcttggttgttcatagcgcccatagcagcatccgcctcggcgtcagtagcaaagcgaacaaagccgaagccgcggctgcgcaaagtcgcacggtctttcacgacaatctgtactcatggtcagtagaagcccaagatgcatgtggtgtacatcagtcaagggagactgacggcttcttgaatctcgccgaatggttggaaaccctcgcgcaaggtgtcatcgctagtatgccaagaaaggccactaaatcccatcgcagcaacggttagactggctcctaccagcacaaatgtgttctcaggtatatatacacactgaataaaaagtttagacatcgtgttagaggtgtaagagaggaagctgtaagagagacgatgctcgagctggcttgatctgaggacggagatgaatgttgaaaaaaaggagacgaccgaaagaaaaggaaggataaaaatatgaacccgtccgaattgtgagacgacagggagatcctagcggctaagaggcgagtcagcatccagtcccgtgtaacaatcacactgcgttagggcttgcacattgccggggattttccactggtcggacgccaacggcaaagtccacaacgagtaatatctatttatgcgtactctgtgctgtgtctttgtctggaatcatgactagagcgagaaaggtccgggcttagcctcaagcgtacttccaagtgggggagggatgctgcagagataaacacgccaaagccagtctcacggccctaaaccttgagctgatacaattgcgggtcgtcgggtttccagcagtcaatcagatggtatccgatgctccgtttggattggcggcacttagggcaacggcttatgtacctttgttgcccctcacttggttgaagatccgagggattctgctttgggattcatagggctggactagcacctagattctattgtgaatctatgtactccatactgagtacatagttagtccatccttcttgctccgagaaccgggatatgagtccattgatgaaagcaacataatttcgggtggagtcttcacgcgtggactgtggaattttgtcgattccccgtagcttgctccatgcctgattggtcgtatgcgtgtttatgcattgtggacttttgtcctcattcggtcgggaatcatttgaggagtgtttggcaatacagacttgagatctgcattcaattaccaccgtggatctagcctctcagttcgggccatcgtcagtctcaaagtggctttgcgcgcgcgtgcatcgggcagagagggcagtgctccgtaggcccacatgcggcttgggccgtcggccttgtacttcatgtgccgggagagatcgcaaatggcgacgatcggcactgggattgcgtctatacgatgttgacatccgtctccgataggttgatgaaggtaggtatgggagaaaagtaccgaaaatgtttgaacaaaagctattcataggtgactcaaggaacacttctcatttaagcgccgagagagagcattaaagagcaataaatgggcattaatagaaaaacaaggaaaaacgaggaaacaatgaaaagacaggaggacgaacttgagatggtcgcgctttcttcggcggtgacttggatttgtgtgctttcaggtcaccttactctgtccagttgcttcaagtctactttatttctacaaacactacccagctctctgagttctgggaactttcttgatggaaagcaataatccaatctatcattggctttccactgttgcgagccagcaacaaagtcgccatcaagatggaggcatgttgttgtcacaaagaactatgaagtctccgcgctaacatagctttagctgagaacaaggaacaagcgaaggacacagctcctgtaacgagcataccgcaaacccgcatcccattcgagatatccgataatttgcgtgtgaatggacattcagccagtaggaagagagattcaggccacaagggaacgaaagcaccgtctacttacgagaccataccacgaagtgagagtcataagagatcacgacatagctacgagataaggtccagacacaagactcgcgaggctcgctatgagtataaaggcccatcatcggctgtggagacccagtcgcagtgtcgcaaaggaagaactaggaaatcccggggcaggaagcacaccatcaatgatgacttccatgccatcaatattacaggaaacagattgacagtaagtattgttctgcaacttctcgctggatgttactcatgccaaatagttgcgcaaaaacatgaacctgggtatgtttagtaagggacggtcttcgtgcataaccaaccaccccggaaataccccgtcaagcgctcttggaagaccaccaagcatcaagcctcataagtggaccgcagaatccgatcttgccttttccgagatgaactttctgtcccggaggaataatcccagcccgtatcccatgtcgaccgccagagacactctggatggacagaacgggagagagcaccacccacgagagctacagttcgcttaccctgcacatgactctagaatcaacaggtctcacttaggcaaccggtttcttgatgtggaacgccaacttgacgtcccagtcacgccgttgttcacatttgaaaaggcgccggtcagcgagatgtccgcagtttccggccactcttggggcacttcctccatgttccacaataaaagaagaaagacatcaaaacagtcatcatcaattccatacacctgggctgagactgaggtcgaccccacggaacaaatcgatgccctcgaacaacacctgctgagcctgctgcatgtcggggtatatccccaagcgctatgctctaatatcacaaatactgtctcggggagacggtattggagtctcgctgaattatgggaattgttgaaggagagaaaggcatcatggtcaaacgaagccggcaacaaaaagcgaacttcacccgaagccaacatggggcaggtagctgcatccgaagccgttccacaggagattcccgagatcgttgcatcagacactttggatcttgccaatgtcagcagtgtacaaaatgaaatatccgaacaatccccagattcgaatgtcgcttgcgaaacggtccgcagtgtgaataacagaccacaacaacaacctccaattctcgaacaacaacaagaccgaccatgtcaagcttcagatagaccggactgtctaaaccaccaagttgccatgatatcaaacatcccagatcgatccatagatatctggggtgaagatcagtgcgagcctttctctcacgaatcgggagagcatgcagtattgtttcccgcatttgcaccggaggtcaaacagccgcatatatctgacattgaattttatgagctagatcgagttgatgatgatgatgagttctatcgcacgctggatgctgcttactgcgccatcgttcgccctgaggttgcggcaggagttgcatcaaacttacagcggtcacttgaatcccccgaacttggcaataatattccgaatagtccagaatcgactggcattcgagactatgatattcctacccgacaagcagaagcaggagaactagaacatctcgcaacggtctcccaggatatcatagaagagcggtatgatgagtggccagcgaagccttctcatcaaaacaaaccacccacgagtcattcgaactatcctggtgttgacccaaacaatgatatgccatggctcactactggatacggcaagccactaactgggaacgacgcgcaacagagtcagcacccagaaatacctgacttctggcgacagaacaaactctactgatcttcaccggcaaggtggttattaactggatagtcgaacgtgtcaatagcaagcttggccacatttgcatcaatcaaccatatcaaagcgaagtagcgccatcttcatgtacatacctcgctagcttgagttcggccgggaatagagattgtgagcaccttgaattcaagatagcattagggtaaccccccctccggacttgtatgatcagaccacacatgtattgtagtaacaaaacacattcccattgtcagacagaaattccagtatcgtgaagcccgaagcattcctacttcaaacgttccgaaattggcttcatggctccttcccaaaccttggaagttccccgtgtaaacaaagaaggcaaacaatgtaaactggaaggtgtgacattgatattgacagggcaggtgcacgagggacctgtcgcactccaggaaggcacgtgggtttggaatataaaaggacccttccccccatttctcttcttctcttcttcttctctcctccccatctctctggccaccatctctccgtccaccccccctcccctccccctccccttcccctcnnnnnnnnnnnnnnnnnnnnnnnnnnnnnnnnnnnnnnnnnnnnnnnnnnnnnnnnnnnnnnnnnnnnnnnnnnnnnnnnnnnnnnnnnnnnnnnnnnnnnnnnnnnnnnnnnnnnnnnnnnnnnnnnnnnnnnnnnnnnnnnnnnnnnnnnnnnnnnnnnnnnnnnnnnnnnnnnnnnnnnnnnnnnnnnnnnnnnnnnnnnnnnnnnnnnnnnnnnnnnnnnnnnnnnnnnnnnnnnnnnnnnnnnnnnnnnnnnnnnnnnnnnnnnnnnnnnnnnnnnnnnnnnnnnnnnnnnnnnnnnnnnnnnnnnnnnnnnnnnnnnnnnnnnnnnnnnnnnnnnnnnnnnnnnnnnnnnnnnnnnnnnnnnnnnnnctcatgctgcttaacctaccacagggatcataacattaccatgtttgttatgaggtctatgtaggtctgcatcaaataacaaaccgagctttctcgtggaagttcctgaagtcgtggctctcattgccatttgacaagtcccacggaatacatgtagatagccataaccgagttgaactcctagacttgatctctccacgtattccaatgtcttgtttgtctcacataatcgttcgcgctgaggtcctcgcagatggttctaacacgacgtgatccctctcgaacgcgtaaacaaaggtctctgctgcgctacacttgccttggtgctgaccagatgtggtgactcttctatttgtaacaataattgggctaatcgagcaaaggatttgactcaaatgcagttcagctcagtcgggttcttcaacatgccaccacaaactgccagtcaatgatttagaaagcacactggcgctggtttatgagagttgatgaattcattgggtatataacagtcttggacagagaaattgaacacatcatcagatggctcaaatccagaactttgtctctattgaagttgacctatccataaatctcactgttggacgaagaacaatcgcgaaacacgagagatcggaaacgaggtctccgtgcaacgccagatacaaccaacgcaaaagatgttgggagttgaattcgataaggcaatcttgtagcttttaagtcgtggatatgttgcggagtccacgaaaataagtcgggtcggttttgtaaagggattggaacgctgagaggtggggcggttgacaatgacacgcttgataaaaatgacatgcagcaagtgcttgcaaggcgattgggactataatctatcatagagtcgcagccgcctcgaccacacccgctgctttgaatgcgcccgggttctgcatcaccacctcaacggggaacttccactccatgaatcgcgtccaacctaaaataccagcccattagcatgttatcctctcgcacagcaagatcgggaagcttgttggtgtcacatactccaatatgcgcatcgtcgtcccaggtatttcccaaggaagggtaccaggaccatactcagaagcagctccagttgttcaatgctttcctgccattctgcctcggcatcggatgaatattccgacaaggtatcgaggtcggagtcgtttgtagattctgaagggagagaggcgagctcatcgtcggactgggactgggagtatgaggattgtcgggagggaaccatgtacgcggacatcgagaaggagggattcgagctgtcttgagagaaagacatgatggagattgttgtaaagagaggtggggttgagtgaatgaggggaagcgatgttgatcaagcagcggcctgcctactgcggttctacgtaaacgtgagagcagcctggactgtttcccttgatcgaccggcaccgccaagctccgtaattaaacacgtgaccgtgtaatctggtgactcacttggcggtcacgtgccaataccgcgataacagaattgccttcagacctggcgatatcagattccagcgacaattttgccatctgacactcttgctctagctcctcgaattcgcaacaacctgatctcatctctaacagattgtggtggagtgaatagcatctttgaagcctacaaacatggcggacgctgtacgtcacacccttgtctttttaccgaccctcccacattttctttaagtctgcacaatatcgacccctcggccgccaaccactctgatccaagaacgcacatcgtttagccgggttcaaggactggtacttttattgaaaagccaggctatacgatttcttctgctatttctctttttactcagaactaacaccgctttttgccgctccgctcaggaactcgaaactaaacagcgcaagtcggtcgcattcagcgaaggatcggtcatcatggataccaatggccaagtcacagatgctcctccggctgaggctcctacagccggtatgcaatagctctccgatcccagcagtcccccagtcgcctttgccacagccccactaacgatgtcttgaatatacagagaaggatgtcgacgaggtcaccgagatgttcaagggtctctcaaaaaagaagaagtcctccaagaagtctaagaccaccgaagccggcgatgacgacgaagcccccgccgccgccgacggcgagttcgatccctctgcgctgaagaagaaaaagaagggcagcagcaagtctaagaaggccgaccccaacgacttcgatgccaagctcgctgaggctggtattgctgaggaggctggcgaggatcagcccgaggagctccccgagggcgaccttgaggccggcaccggtatctgggctcacgacgccacacaacccatcccctactcgctcctcgtctcccgcttcttctccctcatcgagagccaccaccccgaccttctgtccagcggcgccaagtcctacaagattcccccgccccagtgccttcgtgaaggtaaccgtcgtaccattttcgccaacattgccgatatctgcaagcgcatgaagcgaaggttcgctatctcccacctatgtactcgttgaaatttcgtttaacaattttttttaaatagcgaggagcactgcacccaattcctgttcgccgaactcggtacgtcaggcagtgtcgacggtagccgtcgcctggtcatcaagggaagattccaacagaagggtatcgaatcggttctgcgtcgctatattgttgagtacgtcacatgcaagacgtgccgcagccccgacaccgagctcaacaagggagagaaccgtctgtatttcgttacttgcaactcctgcgggtcccgtcgttccgtcgccgccatcaagaccggtttccggtcccagatcggccgcagaaagcgtgtgggctaagcggtggagctgtgctggcaatgtgcgaaggaagggcttgttttatctcttccttatggcgtgtcacttactagagcttttgcggggtggaaacaaggcatgatgcgtttctttctgccctgagaggcttgagatgaggaaacgatttgaagaatgaaaagtagtttcgcatggaatagactgatatcactatgtcttgccttcgaggctgtatgattttgtatctagttgaacgttaggaatgtggtagaatcgcccactcttaaatttctttcttttgccttttaagccttcggtcccacgagtctgatctgctccacggggtactaattagcaagcacttgcctattttaagtctcaagctcaacatcttaaagagatatcggatactttgtttatggcccttcctatggagtaccaaggataggctcgtaggtgtgtagtatatcaaattcatttataattgtggtgatatcgctgcaaaaattcgtaaatagttccacataaatgtactgagcaaaattggtataaaatggagagcagcccgtgattgagcatatgcccggtgcaatgaagaagtatacaacaaaaccacatgatgacaacaagccagggggcatcttcgtttgttccgaaagtagatgtcaacgtataaaattcacaaaccggtctcttctgaccgaatcggcatggtagaattaaccacccttcgcagcactcaacttcatctgggcagaaaaggcattcaggtttctggtctgtaggtagacagttccaggccccgtaaacctgcaagcaagaccctcgccagaggtaacgccggagacgataccgccagaggccacacgttccatcttgtacttgcagtcccaagccacaaggtggccattgtcgacgaagtagctcatgccttcatcaagctttgcaggtgtcagataaaacccccgttgtcaaattaccgggcatgatcaacttacatctttccggatgattgcaccaaaactttgcatccaaaggatcccacttcctgtgatcttgtagatgaagaatccctcaccggagaacatacccttggatagaccttgggactggtgcttatgcccgataccagcggtatatccaagcaaggcgtcgcgtccgattttccattcctttggttcgtctacgtggagggctataatatctcccagcatggaaggtgccagcaggagctcaccaggaccggtgtagtgggacatagtcatgctgcccccaatgaggagtttcttccatgagaacgagatagttcccctcaatgtgatcgttgtagacattccaatcatggcacctaagaggcaagcaagattagctctatggcaatacatactcgggacgaagatatcgattacagcatattcgcgtacaggaattgttgaactggataacttaccaggtctgatattcaaaggacagcccattgccagctgtacggtcaagacagagttgctatctcggtggctgatcctgtaacttccaccattgaagactccagtatcatcttggttcattccacctgtcccagtgagttctccatgttctgaagcatgttctggggttcctccagacactgtttgcattgcaatggcatgattttgttcgaaagccgcttgattgtaggcgattggatcttgctgaggtggactcactggctgccttccaatagtgttattgtaattgaaggctgcttggttgtaggcgattggatcttgctgaggcggactcactggctgccttccaatagtgttattgtaattgaaagcggcttggttgtaggcgattgggtcctggggcgggctcgccgacgtcggaggggctgcatattccctacttggggtttgtcgatggggttgggggctctctgctggtggagtggctggggtatatactccatttgaaggctgctttggcggtggtggatagtagggagccgcaagcgattgtgaaaatgctaaaatatttagtaagatagcaaagacagaagaatcggattaattacaggttatatgcgccggagctagacaattagttagtaacggatttctgtagtttgtaactttgtgaaggcactcacctgtcatgggtggtggggcataatagcttgaatcttgagacattgtggtggttttgatgtcgctgaacaccaatgtctttttattctcttagaaaagtacttctagagtcaaaatccgagtgttcacaggcaaatgaagacactagggaagtcagactcgctaatatcgtcacagcaaaaactcgtagttcctcccgtattattttgcgtcaatgggaagaataatgggtatctcaatggcctggcttgatttagggaataataacaagggaaataaaaccagaccggactctacggggttttctcttttaaaggggagctagcttttcccctcaccaacagctcatactattactattcttagagaggaattccactaagagattaggcgtgtgatgaggcttgcagctcgcagtcaatcagtctcgagtcacacgcaattgtgactatgtgccaccgatcttccccaccgggcgctaaaaagaagttgcatgtgcgagagttgataggcgtgtcctatgcatgctatttaccggggatagctcattcgtcggaattatatatgcaataggccgtacatttataagtctaggtaccaagagcgacagaaaccttgcccagggctgggcaaatatgaggggttgatcggcactttgtattagcgaactcgaagccgaatagttacggagtacagaataatgcgaagaggtaacaactattaggcattatggacaagattgatacaaagcaatgttgaatttttctgctacatacaaattcctagaactaaaggtatataaggtatatatatctcacggctccttggtccccccttcagatacctggcgtaaaaaggacagtgccttagtataaccggtttgcagggcgtaatccaaagccgttttcccttgatcatcccgcaagtcaagcctggctccgttatccacgagcaactggagcatcggaatcggattcattgcaggggtagcgagtcgaagtgcattgttgcctccggcatctcgagcattgacgttcgctccttctttgatcagcaactcagccatctgaagctggttcttcatggcgactgataggagcggtgttctttggccagacccctcaatatctgcgccatgggataatagcagccggacagtatcgagactattcttttcgcatgcccaatgtaggggagtgtggccgacctcgtctagaatatcaatgtttgctccgtgctgtagaagtaatgcgacaatatcgtcctggccttcatgagcagcaattgcaagtggactgatccccgagtgttgcgctgtaatgtttgggttggctccattttgcagtagcagtcgagttccctcgagatcatgggtggaaacgagatcacttaacgcggaacaattgtttggatctatcatatcaatatctgcgccctgtcggcgaagtatgtcaagtgctcgttgagacctaatccgggctgcaaaactgtaccccatcctaacaagcataggaaggtcttcataaagctccacccatcgcagcagaaggaaatacaataaagcatggaagttgttcctgaccagccattcaaggcatgcttgttcatcctccccgtctccttcgcggtcaatgtcatcgagcttatacaacgtgagccaatctttcagtgcgtgaatcgccccttcgattttgtctgggtcttggttttgatcgtttgacccctgtagatcttccgttacattcagtgatctcaaaatgggtttgcagtattccattcctggaacattcgcagaaaggttccacgcaatccacccaagctgacgtgagaacgagttccaccattcgatacgatcatcggatacggactgttgtaagggtggcacatggttgtggacttgaaggaattcagctctgatgtcagacgtgagaagctcacatgtctgttcgaatcctattttgcgaacatctttgttgctgtccgaaagtgcccggcggcaaagaaaccccagttcatggactgatctctcaaactgggaatcgtctgatcgctggcaaatccaacggacaagcgtaaaggcacctttccaatcacctttctcgatcaaccgctccctgcgcgccctgaccttggttgagtctgcagcgagatctggtaagagatgccgatacctgaggacgggaacaatgcatagcagtgcatcctctcttgagcccaatttgctgttctcaaagcaacgtatgagatcatcaatgcgggtactagatgctaaaaatgaattttgcaattcgggaataacatcaacgtccccgcccagatcatccaagttgaggaagacctccttgaggaattgaatgtagatatcctgggctaccatagcctcgagctcattatctgtcctgacagccaggactttcccatcatagggaaggctcttgggctcgaaactgaacaggcgtgatgaattatcatatccttcagatggtactagtctcgcttccgtttgcctgaagatccatttgtaaaagtagaggaatgtttcatctttttttgcctcatcttcactcaatccaatgaggcggcaaagagttgagttctgccagttttcatctgacttataaagtgaccaagtccacaagcctagaaccgcttctagctcggcgacatccagtttccactgcagagcatcaccgcttcggatgagaccaattgaatacgttcccggagcttcagtgacagagcctggagagggtcccttgcacttaaagccaagtcggaactcaaaggtctttccgaggttaactccccaactcgacattagatccatcgtcgactcgatcgtctctgcgaggttggaggcaattcggcgaataggcattccattccagtcaacacccaggctttgtcttgagctagtcgtgagcctcgcgagctgggttctggtgtggattaattgtttggccagaggtgttccaagatggggcgtgaatctctgtgaaggcatatttggtggccgatctgggatcgaggcgagttcaaatgactctactttctcaagataaaatacaaaacaatctatctcttgctgcttgtgagacgtgagttcccggtcgtctttcatcttattttcatctggcttcattctttccgtgcgcagacaggtacgtataatagccattaggaatgttgatcccagttgggctagggtgacagatgaatggagacctctcagtccgacgaactgacatatgaatcccaaaattgtcgatatgagggtagagtaagtctccaaatacttcctgtcaaatcttcgatctctgatcgatttggtatagcggagtttgtccgtcattgaagactctggcccttcattgacggccaagaaagcattaaagacctggtcacccacgtcttgattaccgggctgcagccagtatatcttgcttggcttttctgctttgagatagaactcctttgaggaacgttccatgatgaatgcgcagaagaacattccgagaaacagaagggttgtcccgattatatagagcgggaatgcgtatggagcgacagctttatcgtttttctggaaatgctgaggatacacaaacaccgtgagtgtagcaaaaacaacagtgcctttttggatcgtcagcatcatttcaggctcaagggaggagaagcactgaccagtctgcagtataccaccaagtattgcagcacaatgaaaccaaaattgatctctccttttgattcccttgttcaatgacagattaggcatgtccagttcaggcaagtcagtaggtgaaactttgctattgcaagaccaagccttttcttcaagagcatctctcaaagtgccaatcttcgtctccttttctccggtgatcttgtctacatcctcccaagcaactatctccacgatcttgggccggccaaagactcgtgtaatgccgccatcgttgaaaacctccgcagtggactccgagacacaaggaagcagctcgctttcagcttcagcaggaccttcttgtgctcgtccgacaaatgccctgagggaagaacttccacagaccctgatcaccgacacgacggcagtcaaaacccctagtggtgaaagggcgaatattacattatcaagagtgcttatggactcggagaggaattgtttcgtaagtcgttcgccgaacaaggtgatcaaaggagccttgaagataaacatcagcacatccacttgaggcctcaatataaacataaacataccaagtccgtagcaagattattcgtgaaatcatcccaatcatcatcagccttgacaaaaggtaacaaggatagtaaaaacagtatagaaagaatcatagaaaacatcataaatcatcaacatcaacacatcaattcgtaataaaatagattataaaacagcactcagagaataccctccagcatggccgaaggcgcgctctcttaaagaaaacacccctccatcatcctgcgctatcgatgggcatcttttgccgatcctcactcgatttagagcgaagtacagagcccccatgcttgccccatgacaataatagaacgccaactaatgatatcaagaacactatgaacatggctttaatcttgtcggggtatgaaacacacaaggctagtgcgggcgcgtaagcgctgctgcgctggtgagtgtccccgttgtcactgcactagttgcggcccgcattgcgctatatcacggactgcgggtctggacggggcttttcttggaccggcgcgtaacttaccttgcacataggtggcttagagggttgatatggatatatataggatgtctgttatgcgggggacgttagtagcgtggaacagttcgttgtcgggatatcaatgttttcttggcgccttcagtccttattgtggcactctgggatgcgacatgtatcaaatttgggcaaagacgaggagacagacaaatctagggttgggaatatacgctcttcccctgcaatagggccggggtgtggaacatgtgtaaatcaacggaaattgtggctatggcaaccatatggtctaccttggcagggtgacgatggtggcatcattgcaggcaaatagagactttgactcttatcaaatggtggagatttcaagatattggccctgctcaagtcggattttcgtgttgtataatgaactccgtgtgatgtgaggtgaagatcgatttctctgcttatgtatattttttgattcatcaaatccaaaaaaaaaaagtgctgacaggatataaaggcaattcaatctattatgttgaatcagatggaatcagtgaatgttcacagccctgtggagttgatgtaaatgttaagtcaatgtccggggcggagcttctgagatcttggccagatgatttaggctactcgataacacccgacctcaacacccactctcccgactccccctactatcgtttctgtctacttctcttggttctaccatcgttcccttcaatacataccatccgtgtcctttcacaatggcgcccactgtcaagttcgcgtctgctatgaccacccggtcgctccgcatggtccggacggtatggctttccggcttcctgttcctgaaatgcgaccgaaacactaattccacatcatccaggaactagaattccttgccgatgcctctgtgatcactcccaaccagctctcaaccattctatcacagttgcccgccgattccgaggtctctcgggcgttgcaggcatcaccatcggagcaggcacagcctgcgcctgttcaacaagttccagtacaagcgcagccacctccagctccatacagcaacacgccctcatactcggctcccgtctcacaaatgtccaatatgtcggtgaacgagaaagccgcgctgaacaatcaatatgccagcccgccccctcaggcgccgccttcttatctccaagccccgccgctccgtctggcggtggccatgtacgaattcaaatctaccgacccgggtgacctggacctgaagccgcatgatcgtgtccagattactgaggaaataaacgcgcactgtatgttctccttctattggatatggaaacaaagctgactagtgattaatagggtggcgtggtcgcaatgagcgaactggtcaggagggtatcttccctggaagttacgtggatgaaaaagctgcgcttgcttcgcccccgccccagtctacagactatggaaacatgcctcttgcggtcagccagagtggacagcccgaaaaccccgaggacccaaagaagaacaagttcgaggaaggaggcaagaagttcggaaagaaactgggcaatgccggtacgtcttatatacttttggtactcgttatttggtttctaacttgatattagcaatcttcggtgccggtgctactgttggctccaacatcgtgaacagcatcttctaatcatgcggccgggcaattttgctgggcattttgtttcttattcactctcattgatacggtgttggtggcttgggttttgcttctaatggattggctaggctcaatcacgtcgcttattggcggacttatgtccagaaatttcaggatccccagtgttcagatcctacttagctcttcattgcgatagatcacttagggctacacacatacttacctcaaccaatgactttcctgatattttggggccacctcataattgacctagagcttgaatttcagagcaacaaagatcttacctttctagcacgcaatggaagccaaacgaaagagcataggcaatattccgttacaggcttacccccatgactctgacatgcagcaaaaaaaaaaaaaaagaggatagaaagcataagttcgggttgggaatgacattctgctttttggttattcttctacttcttgtgtgggctatagaatccagactgaacttcgagatacatgatttcatgttgttatatagaaagtatgtaaatgacaagcaacgaaaaggaacatttgaatatctatcccttatacgtgtcatcaaccagccctagagtctgaagatctaacttgtctattgatgggctacacattaatgtacaacatacgatgagcaaggaggctaagcctaacctggtgcccgatcagccccatcgtggggacctgggttgaagactcattgtgactcttgtgcttacttcggtataatatagcgtctgagaatggcgattggttattgaatgcatattctgttgctcttctcctatgatatcagtgattagggctaggaatgcgcacacaaggccgtatgacatcaagttgtgggtcaagtagcatcattgtcttgccgatggcttaaagcggactatatcagtatgttttatatacaaattaccggggatacagtactgttgaagactatataaactttccttaacctcatattgtcgataggagtcttgaatatatgaaatagtgtgtataattgcaagtagctgtggcaatgtggtgggaactgccgatgagcatagcgaactccaaagacccattgtacatagcccgtatgtacaaaatagacaaaaccctacaaactgcgaacagccatacagagctgatagaagtagcaaatgatttcaaatctaaaagagagccgagccacaacgaacaagagtaagacgcctttgacccagatacccactaggcccaatccggaatagcgcattctcccctccctcgagaagcttctgtgtcatcgatataaattgcatttctctctttaccctcacacgaccaacgtcatctctctccacgcccagctctattcctaccaaacccaaccacccaaaccaccaaatccaacctcatttcaaaatgtctgactgggaaagcaccaccaagattggcagcaagttccgcggagcaggcgctcaaccccgcgaggtcgtcgtcaagggcaagagtgccctgaacgctgcccagcgctctggcggtgtcatcaccgagaagaagtacaccaccggtaacatcgtatgtgaagtttccttcgaatccgggagaaacaccatgaatgtaggctaacccactctcaagagtgccaaggcaggcgcccccgaaggccaacacttgaccaaggtcgaccgcagcgacgacatcgtcaagcccaagaccatcggccacgccgtcgctgatgctatcaagagacgtcgcacagaggagggctacaagatgacccagaaggaactcgccaccaagtgcaacaccactatcaccattgtccaggacttcgagcgtggaaccgccgctcccgaccagaaggttctcggagccatggagcgtgtgctgaacattaagctgcgtggctcagacatcggctctgaaaagttccccaagaagaaatagacgggatttagtccgtggcctttatcccttccgggatgggaccggggcaaatctcaagttttctgcatttgctttttttgcgctctatgactgtcatgttccttctccttttcatgagacgtcactttttttttattttttttctacgggtttcttttctgctggtcggattagcgctggccttgcatgggaaacgggtttagagaagatatcacgaaaaaaaattgtataaatgagatacctcggattttgatatttatcatctggttttcttagaaacttgtagttggcatccaagtgtaaatttgaatacggagtagatggatgttgttctcatacttagcgcatcatccatgccatgcgatatatatatgcagtggggtaaatatactccttccctatacgagggactatgccaatccctgctctgctccatccagctgaactgtcagaacgtaatttgaagatttgcaaagctttgatttcgtctattgacccgatttcatctcttttgcggaggaccaggacagacataagagctcaaaaaaagaaccatgtcatctttttattaaacaaagacacaaacacaaggtaccaactccgattgatcatggaatcaatgaaatgagaaaatcgtggaccggaaggtcatcccattccgtatgcgggactcggggaatttgtcccaagtcttttcgcctcgtaaacacatacacacgacgcatcccaactttcttcaccacatcccctatttacttccgcgcttgctcccgctcgacctcgtacatgaagtcgaagtatgccttgtcaaagtggtggacacggacgtatccgtcctcaccaccggaggcgtatgcggtgcctgcggggtgaacatcgatggtgttaaggggaccgaaatggccacgaacgcggccgcattcatcttcgaacacctgagtaataagattgttagtatataagttaagtcgtttgaatgcatatttgtactcactctgtggtagaatcgtgcctcgaatttaccctggcgggcggaggtggtagtaacatccatggcggcttgaccaccacccagaatgacaaagtccttcttcggtgtcacgctagcagtgttgagaggagtgtcggaaatataggttttgaggatggcgaggttgcgggaggacaggagctgcataatattagccgggggttgcctaatagaataatctgcaaaaggaagaacgtaccttagctgacttgtctttcgacgcagtaatgaaagacaagcgatcaggcgcgaactgaatgtcagttatttggctgtcgaattcgtgaatctgcacgttctcgacttgttctccagactaaagatggtattagtatcccacattcctccaaccacctcaaaaaaacataccttaggatcatactggctgacgctgccgtcctcgtgccccgcaatgatgtacttgcccaggaaactccaccccgccacggtagccttgctctcctcacaaacgatggtcaaggtaggctcggtggcctgcgcgctaaggttttcgccgtagttgatatcgagaacggcgatagtaccattgaaacccatgcgcttttccgtcacggccaaaagtctgcttccatcgggggagaatgccacgcgcttcacggctgtcgagaactcccacaccttaacacactcgccggtcttgacgttccatagacgcacggtgttgtctgctgatccggttgcaagaagaatggtgttggggctgacgtcgactgtccagacagcaccctggtggccgttgtaggtaccgagacgctcgccgttggcggaccaccatgcgcacacaatcttatccttcgagacggagaagaggagatcgccgtcgctgttgaacttgatctgggtcagggaccgctcctgttgttatagttggctgcggtcagtctctgtggatccagcaagatttcgaggaagtcaacgcacatggccggaaagcaaaatggggcgcatttcgaagggtgaggtgataggaaattcgagatggagtatcggaggggaaaaatctgagacgctcggctcagaaggggtaaggcggagtggcttttttgggggggtcaacctcgtcaacctcactttctttgactagtgaatttcatcgcacactcggccctcaatgccaagcctttatcggaggccaacatattccgcattccggtatctacacgtgactactatctgtctaccctgagccctaactaggattcccgaaaaggttaatgcggctgagatttatttatgcctcaggcagaacaaacaaatacaatatctccggagtcacgtgctttcgggaaaccgggaaactcccggactctccgcacgagcttaattaccgaaaaaaaaagagatgaagtgaatctgagggaaatatctcaaaattgacagggctggctttaacctcagtatatctcttgagcgttgcaggtgaaaccaaggcctaattgttgatttcttctcgcaacgccggtaccaactccgcgggttcgccccaaacaagcaataattcatgccattcgtccccgctgccctaccccgctgcactttttatctccaagtgcatgggggtattctccgaaaacttcctatcctatcccgttctttgctccatacctcttcctcgatccaaggagtcagacggcttcgttcattgtccattgagtctccagtgaacgccgatttttctcttatcagctccgctatctcaccactccgaaagttttccgggtcagcaatggctgccgcgaagattgatggcactgccatcgcgaagagtattcgccaagggttgaagtccgagatcgagcagattcaagtgacgaaccccagattcaagccaaatctggttatcttccagggtaagcgtgacccgctccgagcatgaatacatgtaatgtagtgttgaatactaacatgacgattcttatctagtcggcaatcggtcggattcaagttggtttacctacgaatagtattgaagatcttgcggactaattttacttaggcacctatgtgcgcatgaagctgaaggccgcccaggaggtatgactcgttgttcgggatatccgaggcattctctgaccttattcctaggccaacatcatctgcaccgtgatcaatgttcccgaatcgagcaccgagttggagctcatccaagagatcaccaaagccaacaatgaccccgctgtccacggtatcctcgttcaattgcccgtcccaagccacatgtccgagcatgcggtcacgtcgagtgttgcagatgagaaagatgtcgatggtttcggcgcaatcaatatcggcgagctggcgaagcgaggcggtcgcccgttgttcactccgtgcacccctctcgcggttatggaactactcaaggcaagcggcgtagaccccgccggtaaggaggcagtggtactgggacggagtgacatcgtcggcagtccggtcagctatttgcttaagaacgccgatgctaccgttactgtctgccactcaaagacaccggatattgcgcgcattgtcaagaccgccgacattgttgtagcggccattggccaaaccgagcttgtgaagggtgaatggttgaagcccggtgctgtagttattgatgtcggtatcaattacaagcctgatgcgactaagaagtccggtgagcgactggttggcgacgtggactttgagtctgcttcccaggtggcctcacaaatcacccccgtccccggtggtgttggtcctatgacagtggctatgttgttgaagaacgtggtgggtgccacaaagtgctacttcgagaaacagaaggaccgccacgtcactcctcttcctattcgcatactaaatcccgtgccttccgacattgctatctcgcgggcccagtaccccaagcccatcacccaggttgccaccgaggtcggcattgcccctcatgagttggagccctacggccacaccaaggccaagattagtctgagtgtgctggaacgcctctcccatcgccgcaacggaagatacatcttggtttgcggtatcacacccacccctcttggtgagggcaagtccactaccacactaggtctcactcaagcacttggtgcccacctgaaccgcatttcctttgccaacgtccgacagcccagccaaggccccacattcggcatcaagggtggtgctgctggtggaggctacagtcaggttattcctatggacgagttcaatctccacctcacgggtgacatccacgccatcaccgccgcgaacaaccttctcgctgcggctattgagactcgcatgttccacgagtccacccagaaagatgcagctctctacaagcgtcttgtccctgccagcaagggcaagcgtgaattcaagcccatcatgttccgacgtctgaagaagctgggcattgagaagaccaacccagacgatctcactgaggaggaaatcacccgctttgcccgcctagatatcgacccagagaccatcacttggcgccgtgttctcgatgtcaatgaccgtcatctacgtggtatcactgtcggccaggcccctaccgagaagggcctgtctcgtgagactggcttcgatatctccgtcgctagtgagtgcatggccattcttgccttgagtaacgatttggcggatatgcgtgagcgactgggccgtatggttgttgctacttctagaagcggcgaccccgtgacttgcgacgacattggtgccggtggtgcccttgccgccttgatgaaggatgccattaagccaaatttgatgcagagtttggaaggcactcctgtgatggtgcacgctggtccctttgccaacatcagtattggcgccagctctgccatcgccgataagcttgccctgaaacttgccggtaccgagcctgatgaggaccatgaagccaagaccggtttcgtggtcaccgaggctggcttcgacttcacaatgggtggtgagcgcttctttaacatcaagtgccgctcctctggtctggttccggacaccgtcgttattgtggctactgtccgtgcgctgaaggttcacggcggcggccccgagatcaagcccggtgcccctctgcaggaggtctaccgcaccgagaatgtggatattctccgcaagggttgtgttaacctgcggaagcacattgctaacgccaagctgtacggcgtcccggtggtggtggctatcaataagttcgacaccgataccgaggctgaaattgctgtcatcaaggaggaggcgatcgccgctggtgccgaggatgccgtccctgccaaccattgggctgagggtggagccggcgctgttgatctggccaaggctgtcataaccgccagctccaaggagaaggacttccggctcctctacgacctggatggtactatccaggagcgcatcgagcgcatcggccaggccatgtatggcgctgagaaggttgagttcagtgaattggctcagaagaaggtcgacgcctacaccaagcaaggattcgcgaacctgccgatctgtatcgccaagactcagtactcactcagtcacgacccagccctcaagggtgcccccaccggcttcactgtgcccattcgggatgtcagattggccgtgggcgctggatacctgtaagtttttatccccgcattttgtgggaattcgtcacgctaacatagctatagctacgctctggccgccgatatccagaccattcccggactacccactgcccccggctaccttaatgtggatatcgaccccgagactggcgatattgacgggctgttctaggttacgatatagatagaggacatatttggagcttgcatataccactgttcgaatttcgattcttcaacacatacaattggcgtctgatagttagggcccttagatggatttttcaacaccgcgcaatccggggcaattggacacgcgaaattcatcccgacatattatttcataatcaataacatttttttctctctgaatatagatcgtacaattcggttggagctcttccggggtcaaaaagagggccggtcaatggccggagttgagctccgttctccgggaaccgctttaccaccgcgtatagacttcttcagcgggtcgattgatggagctttgaggtaaaaaaattggaaattttacctgagaaaggattagatcgatgactcaggacacttggaagagaaagatataaagaaaaagaaaagtccacgtgaaattgtcctaaaacattcccaaaccaaaatatccttgatatctcgtgaccgtccggcttcggcgcttcttcttgcggaactgttcataaagtcgccaacctccattacaccggacaaggctttttcctcttccactccttcgaaccctccagtttccttgctattcggtaattatcccttggcttactgccttcctggtcttattccgatcaattcccgtattgccccggtgccttaaccccccacgtacacccccatccccgaagtcgcatcttctgtcaaccgggaaatttcccgactccacatcttcctttctgccgaacctcattccctcggtagtaaaccagcgagtgaggcgactcgcattccacccagccaaacagaaactgtgaaactagcgctgacgtctttagccactatcccacgatgaacgctctccggtctagttccgcactcgctcgtcggtccctcgcgacccctcctgcccctctctctcccacttcccgtcttatttcttcctcttctttcacttccttactttctaagagatctatctcctctacctctctttcccaacaaactaatcgagttgttgcttgttcccgctggtccggatcgatcccctcgtctttcactcaaacccgcactatggcttccgaaaccaagattaaggtcaagacccctgtggtcgagttggatggtgatgaggtatgggacaacccccccttttatagttcaagctttcgatcagctggcttcacaaacccgcgtattctcgtgcttggctgccgcattttcgtcgaaaacgcggggaatcacggggaattttacgataattcatgtgtcaggccgacgattatgccgcccaaggcattgaagctagacattggcatgtgctaactggacgatcttccttaacatagatgacccgtattatctggcaagacatccgtaacaaggtaagcctatcgtcccatcctcgctcgggtcagacctagatgatcgcccaccccggttagttctcgatactaatgatctgcctatagttgatcctgcctttcctcgatatcgacctcaagtactacgatttgggtatcgagtaccgtgatcagaccaatgatcaggtcaccattgactccgccgaggctattaagaagtacggtgtcggtgtcaagtgcgccaccatcacccccgatgaggcccgtgttgaggagttcaagctgaagaagagtaagctcatcaatggaagtttgtatcgtgtaacactaaagctaaccatctctagtgtggctctcccccaacggcactatccgtaacattctgtgagtaagctcaatctaactggctttgaccatcactaataagctatctagtggcggtaccgtgttccgtgagcccattatcattccccgcgttccccgcctggtccctggctggaccaagcctattattattggccgtcacgccttcggtgaccagtaccgtgcccaggaccgtgtcatccccggtcctggtaagctccagttggtctacacccctaccggtggagagcccgagtacctccaggtctacgatttcgagggtggtggtgtcgctcagtgccagtacaacaccgatgattccatcgctggcttcgcccactcctctttcaagatggctctcagcaagggtcttcccctctacatgagcaccaagaacactatcctcaagaagtacgatggtcgcttcaaggacatcttccaggagatctacgagaaggagtacaagaaggacttcgaggccaagaagatctggtacgagcaccgtctcattgacgacatggtcgcccagatgatcaagtctgagggtggcttcgtcatggctcttaagagtaagtttttccgtctatcttgtgttagtttatcttatctaacgtatgttcagactacgacggtgatgtccagtccgatatcgtcgcccaaggattcggctctctcggtctgatgacctccactctgagcacccccgatggtaaggccttcgagtccgaggccgcccacggaaccgtgacccgtcactaccgtgagcaccagaagggtaacgagacctccaccaaccccattgcctccatcttcgcctggacccgtggtcttgtccagcgtggtgagctcgacaacacccctgatgttgttgccttcgccgaggagctcgagcgcgcctgcattgatgtcgtcaacgacgaggctatcatgactaaggatttggctctcgcctgtggccgcaaggaccgcgaggcttgggtcaccaccagcgagtacatggctgccgttgagcggaggctgaaggccaacctcaaggctcgcctgtagattcccatttgctgcaaaatttgatgagatactccagtcttagattccctagaaggacaggcattcgtctagcttttagccacttttgtatagtatgcaattgaattgtcattctatatattatttttcaaagtatatcgtggacaaacaggttctcaacggtagtatctaggttcctgcgcttgtttcaggtgatacagttttccattagcccggctcaaccactccctgtctacctcgctaccacaggggtaaaaagttctcctgtaccgattatgggacgtaacatataatcctcaaaacgtcactcacgccacaatctgcttggggacaaaatggaagattaacaggaatcggagtatccaaatcaggaaataatggcttcattctcctagccgaacatcaacttcaaaccctaagcaggacagcaaccatacagaacatgtcccaagtatgaagcaaacaaggatcttccacctgataatgtgatatctatcccaaagccgtggtaactttctctaaagttacgggaggtcgttaccgaacaatcaccaaaaacctagaaccaattagggtatgattcggagatgtgggatccataactctattcggacagccaatcatatcctctgattttagttagccatcgacctagatcgaggtcttgacgcaagtggttatcgtcgcttcccaatgcggccaattcctcttttcgacggtcaaaccaactctcatacagggaacttgattggaagactaggggctcgggtgaaaactcctgccaatctggctgtcaaactcgtttgttcgtcacagggtagccggcgccagatagatctgggttaagacaggcgttttctttcttcctttcttctaaccttctacttgggattggaattgcacttctttacttgaaataagactacctaccaataatcacccgctgtgtgatggcggtgctgttctactacattccgttgaatacgatgccacacgtctacggcggtctccattaggattttgctggtatcttcgagacttgtcaattggtccttgccggtcgaatgtacgttgtggccatctcgtcggtctttacggggctggcggttctggttgttgccctgcggttatacactcggatccacctggtgaaggctcctggactggacgatttgattatatttgttgcattggtatgtattctcatatgatatgtacaccacgagtgcacgcgtccgggagacggagtgtatggaaagtgagaacccaatactaatcatccaatacagctcgtcgacgtggcattctatacctttacgatgcttggtaagtggtctactccaacaacacctcgactgaaatatacctgaatctaacaaattcctccatagaacgattatacggcatcgggatccgcgcatcagaactctctgaatatgacatcgagcgccaactatttgtacggcaaaagtcccttccgccatcgaatggaacaagccactaatgaaaaccaatcacagtggttgtggctttcggtccctttttacaacatgactatgatcctagccaaattctccgcactcacactctacgcccgcctcttcaggccccgtcgcttcctgctaatcacctacagcttaatgggcttcctcgttatcgtaggtctgtggacgagcctgagcggctttctcttctgcattcctctccacgccttctggagtccatcggcagaggttcgcgactcaaactgtctacctgccagccctgtctggttcaccaatgcggcactccagacttttaccgatctggtaatattggttctgcccctgtcgctattatggaagttacagctaccgagaagacagaagtgggggatcctggtggttttcggtcttggaatcttgtaagtcgaagtaacatagtttgtggttgatctcgggaaatgaagctgactctgcttacagtattgttggcgttagtgccgctcgcatgtatccattaagcatcatggttggcggaggagattttacgcgtaagtatataccatctctccacgtcttgcgatgcacggaatcaacaacaagactaacacaccgatagaggcaaatgccaaagcagccctttggtcctgcctcgaagcaaacgtatccatcatctgcatctgcctaccaccactccacccgctcttctctcgcatcttctcattcttcttcctccctcgaccgatccgctcaagagcctcgaggtgtcattccagcagatccccgctcaaccgggatgccgggatctggtgcaacgaactcttcagtcccggaacagcaagttactctgctagcatctccaaggtcgatacgaacgaagaggagcaagaaaaagcagaggggattcgtgttaaacgcgagctgaggatgcagtcgaatactgttccttctttttcccgtcctcagtctgcgaatggtacctatccggatatcgagatgacagaggggtcgggcagtctgaaatcgtctgagcatccatgctcgaatgctagttttgagagggatttcggtgatttcgagttccccgactataagaatcgaatgaatgctcctatttgaaattgtcgggagcttggtttgtatatatggaacataccaatgtctgggatgtgattgcatatactgatgatatgaataacgatgttgattttatgagttttattgagtcatgttcgatgcgggtggaatatttagaaatttagaaagcttgatatatagtaccctgttataccccgttcgagactggggaaacttctgtagaaacctcaagagtaccaaatataactagtccgaataagaaataagcaccaacccttccgtctcaagcctagaacgactcaaagattcgcccgcgaagtcatcttcctctgcatagcctgttcaatcgccttggccgcagcaatacacttctcttcaccgaaccggccaccaacaacctgtatcccgacaggcataccctccaccaggttgatatcatctaaaaaggaattagcaccgtcctcaaaggctccaatcttatatactcacattgctgcttattaaacctatcactatcatttctcggaacatgggccagccactcatcatccggaacatccttcattctcgaagcagtagtgataggcattgccaacgcagcatagccaaggaaattccagatactcgtgtagcccacatatgcactggacttgacccacgtccacggtttgtatcccacccatgaggtattgggcatgatcaatacgtcgatatcggaggttatccatctatcgagatatgcagattcgaaattatatttgtccgcattgagctatgagatatgttagcagttaataatcacagtgccgataggagtttctcacttggtgcgtttgactggtagtcagagtatcctcgggcttaccaacaagcataccctcaacaagaggctcgccggttttctctatttgtctccgacagccctcgccgccgtcggagaaaatagccttcgcccagaggtcatatgcataactgtgtgaggaggcatcccactcgaacactgggatttgtcagtacgtcgtacagaccacgcattgggagtggaggttgtcagttacgatacataccctcatggcccgccgcttccagcgcctcaacaacctcccgcatagccctcgcaatcggtggctgaaccttgacaacaccatcatcaaccaagaacccaatccttaacctcttcgcaccaggcgaagccaactccttccgccacgccacaggagcaacatgctgatcaacctcccacggcctcgactccggcaaaacctccatataccgctcaatagtcaccagactacaagccataggcccagcaactgatctcacaatatcctgcccgggactagaaatcatcaaaatcagcaccccctctaacaaacgcaaaacagagaaaaataaacttacttcccccgttcatacggatgtctaccgggactaggcgacaatccataaagtccacacagagcagccgggatacgaatcgaaccacccaagtccgtgccaataccgagcacacttccacgcgcagcaaccagcgagccctcgccgccggaactcccaccggaaatcagactgcggttgaaggggttgacgcattggccgaagacgtggttgtacgagtcggacatcatcattgactgcggcagattggttttcacgtagaggacggcgccgaggcggcggagtgtacgcgctacggatttatctgctttggcggggttgttggtgaggccgacccagcctggattttgggtttttgttagtatataaggataggtggctttttgctatatggaagtggaaagggagattaggttaccgattgaagtgtcaactccttcaacggagaataggtctttgatggatactggtaatccgtgtagagggccgatagtcttgcccgtctgggcgagataatcatctagtttctgggcaacggcgaaggcctcttcgaagaagatctcagtgcagcatgttgtcagttggtgggcgagagcggcgcgcttggcgaagactcgagtcagctctagggacgagagttccccagatgagagcttgcggagaaggacggcgatatccgtctcttccgtgagagccagttcctctggactgagaatttggcgcagatatgccagagcgtctggggcggattctatagagggaacgggatctaagcgccattcggggatgatgagcgagagctggtcggcgcgcttttgagcgcaacggtcttggtacgaggtagaggtagccatgggaaataactatattgtatgtttatgattgaactatggaggtaggaaactggattctaagaggacctttatatgctcaccaacaaagtagataaggaatgtgataccttacccgattaggaaggcaatctaaccgagactaaaccccacaccgcatatcctccacctcctctcgcactgcgcctctgcgtccggataacgagggaattcacatgactggcagttacgccagtagcctcgtattatctcgcactgccgtgttatcgaggcactcatccctatcaggtatgcgggggtagctaggtgcacgtagaacctcgatgtagaagggatctccgcgatagcctggcaagctcgatccaccatggaagacactacatttgactgatatgtcgatgcagatgaatcgccgcccgtggccattcctgcgcgaccgaatgccatgattgcggcggcgcctctatacacggtcgcagcaagattgcggtccgtcaagtcccccgagttgagctgtagagtttgggctattgctcgagcacagaggtccatagcgcaggttccattgccattgcggtgttttgcaagataaacaaataaatcgaacgtatctgctggacatccgactgagtcgaaaaatccaatagttaaggtctcgcgatgccaatcctcgaaaattaatggactttccctgacaagggcgcctgtaacatcaaaccacaccagataggctaggatatctgctagagcggagatctcgccgcagaggttatcgagatcagccttatgttggcagtggagatctagcagcgagcgcgccccttggagatggcaatgccagttgccaaaagatccacagcacacttcaaacatggcgaaagtggcgatgccgaaaagcgcaattgggtgtgcggactggacaacttggttcaggtttgtcaaggccactagatgcgactggagggattctttgttgtttgcatcttggatacgcgagcgggcgaagtttagcgtgcgtgaaatcagttggattccttcttctggaatgtcacgactgctggattgtatttgttggcagaaagtgtccaggaggtcgacgaagccgtatagattgatagatgctgacttgtaaacttcgacatttggcgattggtcattgggagtctgtggtgaggtgcttttgggcgatttcggcttcttcttatcatctacccatacaactcgctgtggatagttgcatgcttctccaccctggacacaggcttgacatcggggccggttcaagtcacatttgagccctcgggctttgcatcgaccacagtctcgatcgtgccgaatgcctcggggctttttcactttcatggtgtgtgtgaagttgccaggcttggaaggctatcaagatgcatagtgcgggggttgcggacacttccccgattagtcttgggtggagctctcgtatcttcgatgttgatccttttagtgttttggtttcggctgtttctatatcttcttcagtgccggaggaaaaacaagaagagagtgtgcattttatctagcaataaccctgcaataattgggttcaactctggttgaggtcaacaagtgaaggacacacgctgcgaagaaaagtgaaagacaatatcatcaaccgggagccggttggaaatgatcagagacaagataaaacgagggcaaagtcacagccggtcgagaatagtaaaattaaaacaaagcctgcagcaagaatagagaaaagagcgtgaaagaaaacgagagacaaatttgctagccatgtgctaactgagagcaaaaaaaagcaatctcgccagcaagaacagaatagcccaaatgaatagccagacccagaaaaaagcaacagaaaagaaggacatctatctataaaccagaaaccagtcaaataacttttgtgaataataacatcagtcaagacagtgatacagcctcatgtgttgttcagaccatctctttctgcataactcagtgcttgcacatacccgggctccaattgggaatccgcatcatgtttcgatatggctgcttgccacgatcggattgcttcctgcgttgcatcatgcgctcacgtcgatcgcgtctcttggtagccgaattcggttgctctggcttcaggttcagcgcttccattgaaatcgataacggtgattcttggaactttctttcttccgcgcgtcgacgacgcagtataacctttcgatgatgtcttgagataacacggatggaggagatcttggagaccttggagttcgccttggaaacctttgacacctttgagtctgagacttgagagagactctttgcttctgcaacactgatactggcatacaaactgcttccacgggagagctttcttcttcgcatcctcttcatttgctcgatggcagcaactgtgagagatcgagtggacgcaacgcttccactttgcattgatgcaacgctttcgttttgtagggatgcaacgcgctggggcttggcaaacggtccatcatgtgcatgtggataaggggactcaggcctgcgagtgttcaccgagttggtcgtggacagaggagggctgccaacgccgactgttccaaatatgtgaggaggaagcgagttctcgatgctcatacgtcgttgcattccagcagggcctgatgcaatatccggataatgtgagttcatgtcaagcacacacattccaacaaaaggcgcctgaaggatcgcactgaaaggaggctgctccaagaagtggcttggaggggcatgatggagcaccgtaggcaaggaaacagcctcagtgtgctgggtacttggtgaggcgggttgttcctgacagtctttggtcgggcagggcttattggcagccacaggagaatcatttcgtgagacgctctggtgcagtgagtccacaccgtacgagcagtgatgacagacaacgtcatattccccttctcgtggtataaatgtcatggacgccgggtacattcccatatacatgtcaggggcccagttgcaaacctccaaccaagaaggtaactcgtcgagtgcgataagaggcgtccaaaagcctcccggacgcaggatgcaaaatcgtggacgtgggcgtagaagaaagcttggagggtgctgctgagattggacaaagtccggacgtggggtagtatattgcattttaaagagactggaagaagaaggaaatgagtgtagtggaacaatgattgtataataaaagagtgttgtatgaaagaatgtatggattatggaagaggaagaagaagaggagaaggaagaagaagaggaagaggaagaggaagaggggagcgatggagttctgtcgattctgaggaaggaacagcatagacagtattgcaggaaggagcgatgggtcaaatgtcaaaaggaaagaacgatagtgatgaccattcccagtaagtataaatctgatttctagcagatgttcctcttactgaggagcgattggctagagtattatattccatcttgtcacgtctgctggacaatatataccggacacgagagaggtcatcaaggtcaatgacgccatatgtatatacgatgatatagcgtcaaattttcatttccttccaagttctgccttggcatcaccatattgtcaccttttcgattctccttgtagtcaagttgagtcaaaaccccccgggctgattgatactagggctattttctccttatcttctcttatcgcgtgttatcggcacttcaaagcttatcggcccggatgcaaacaacgtccgagctactctggcagccaagtgttgtacacaactcatactcactcttaccaacttaccttcctctctcctcaactcccttccttccttctcaattacaatcttttatcaacaaaaccgactccatcatgacaaccctcacagacccaacgaacgccacccgcgcaactccaagcattcccatcgagaaagcagtcctccacatcggcagctcaaccttcataagcgcccccaaccaagaagtctgggcagcgctaacaaacacctcaacctggccaagctggaatagctttgtgccacgggtaaccattcgctcccagccaaccccagatccatctccatccacctccgcaccggacccagcaccagcgtcaacatcaacacaaaccccagcaccaacctcccaaaccgtaaatacaaacacagaactatctcctattctccaaaaaggaacaaaattcaccctacacgtccgcatggacccaacctcaacctccaccaagccccagccggcaacagacgtgcatgccctcatcagcgaatgcagagcgccaaacgcggagaccggcgaggtcggccgtatcgtttgggtcgctgattccgaagcgccgggctcgttttcgccatcgcttttgacggcggagcgtgtgcatgagattacggctgttgagggtgggacagaagtgaggaactgggaggcgcaggttgggtggttggtttatgcggtgcggtggctgtataaggttaagctgcaggcgaattttgagatgtgggttgctgatttgagggggtttgttgaggggggcagtattgctagttcttgattacgcgttgaaactgttgccctgcgagctaggctcgaaaaatctgggtatccccgtaacatgatcaatagttagccacctggacactttattacgcatgattcaacgaaaagtggcatgatacgagtgcttgaacatcccattgatcctgctccttgacaccggaatcggatgagaatggcctgagcgttgagccaaatggcatttgcgctggattcagatggtcagtagaccgcaaacgcggccgacgtgtcatgctatttaattaaatattatgttcattcctccaatatgcaagtatgcaaatatgcaaatatgcgaacaaaatgtactccaatgccatacatgttccgccaaactccatctaaacagggtatatggacaatgcaaataaaaaccaaaacaaataaccaaaagagcatagcaaatatatcccgtctaacatcaagcagacgcaagctcgacccaatcaggcgtcgtaatgcgcatcgccggatccttaacaacagccggcttaacaatgcgctcaacaaacccattcctcggaacccgactgccgttcatacccgacctcgcaaaatccacaatctgatgcccagccctcgccatctcgagcctgagccgatggttcatattaggataaagcagcaaatcgcccgtcgcagtcgcaagcagcgtagccgccagcgagaagacatccgacgcaggcgtcggcgccatctcagtagacgtgagggaagccagcatttccggcgccgtgaacggcggcgtgaacgagggcatggatgcgcgcgtggtatcgagcggcgcatcggccgtcggaatatcaacggtggcggagaaatctgcgaacagaggctcgtaagggaactcggggttctcgctgcactcgtctgtgtcgatgggtcggaggaggatgttgtgtggtttgatgtcgccgtgcacgacgccggcgacttggtgcagccagttcaggccggcgataagcttgcgcgcgagctcctggtacgaggctgggccttggacggggtcgaacattgttgctgttgcgggtctgcgggtgcgcgcgagctgggattgctcttcgatgtatagtgccagggaggaggggacggcggtcattactagtgcgctaagctcggcgctgtagccgtggaaggggacgatgtagtgctcgtggccttgggtgaaggtgaggcgggttagggttgatgcttcggctttgagaactgggcgcgcatcgcggcgcagtggtgctttcacggctagcacttgcgatcttgaggttggggagcttgggggtgtgccggggagattggtttgcgggcgtggcaatgagcgcgctttgtatactatgctccagacgccgcggccgaactcggcggggcggttgttctcgtcctggcagatttcgaggtcgtcggtgaattgtagagtgccggcattgtccttggaaatggacgtttgctttgccaaattttggaatggacttggagttgatcttggaggcctttctttggctataggcgtcaccggtggggtgagactcgatggggcttgagccgacagtggcgggctttggccggctgtctgaagcgacaattgaattggggaattggccatattttcagtgcgcaataccggaggaattcgcgagcagatcagggtctatatgatcccgggggaacgggcgagacccgcgtaatcgttctgatatcaacagcgccaccgggacatgcgataggcaaattaagcctcacccacgggtgcaagtataataatgacggagtggcgaatggtgtttataagattgggctagaagatagacaaagaataacagggaaatggctatgctaaaagtactccgaccaacagcaaagaaaaaaaaaaaacaacccaaaccggcccacttccggtctcgaacatgcaaagggaaaaagagagaaaagggaaagatacaagatcgacggtgacctcaagatactacggtgtcactggataagtgcaaacggggggaactaatctggagacgggtccagttcatttcctttgactttttaagattagacaagtcagtattcaacggttcgacttatttcggcaacctgcgatttgccgcttcgagttgcgatcggcttccgttggactcacccgaatctgaccagtcaagggcaaccgttgaacacatgttcgatcctgtggatcacgtaatcacggcagggtcccgaggtcaggtgattgaccagcgatcacgtgggaagaattagtcatcctgccctaagccgcccatggctaccaaggccacgggctggttgcaccggagacgagaaggttcaacccggttatggcgagggtcactgatcgcttgtagacaaacggctggtagaatgaggcaatcaagtccatcctcaagcgcgtcaagctcgtccttggttagtaatatatgatacccaatcccagatacccatgatgccaacaatgttgaggcaaagtcgaactcatggctcccatcaagggcttgtctgtttttggaatcctcttaaccagcgagcagatacagtagtgctccaagggcttgggtatgagtcacactcgggaagcggcctgtgacagcaaagcgccagcacgagattggcgtcaccataaattcccgaaatggcgttcaggcgcagtgacgaagaacttggaacacgaagttggcccccatgcgacattctcatttgtagcatggttgcaattccgacatcacaccgcgccaggtcattgccttgcgggaattttgccctgggcagccgtcgacaccagaaggtgggatatcgggcgctctgccgcttcatattataacttcgctctccattctgtaatctcccgtcaagccagtgcttattgtagcaactgacatcatatcatcatcgaggggtgagcctagggtttatctttcaccatatgactgtctgggcgatgacccgaatatgatgtgaagaggaagtccaggattctggttgttccgatcggattgtgggcgaagtctgtcatagcgtgcgtctacaccataataatactagaattcgaacaatatcatgggggtatcaactaaaagaacataatggaatttttaaccggaatcttcgtaggggtttacagtctccgcaaaagtccgattgctcagccagcctattttctactcggtagatagtagatactacttgaaatccaagaaaaagaaatatgcaaaaatggaaccagcctattgaagctttcgattcagctctctgaacccctgttcctagggcttcttatttctccaatcaaatcgatcttcaagctacggagtacttatccgtatcacccgggtgaaatctgggtgaaatctgggtgagacgggccggcgcgatcaccacacgtggctcagccagagtttagtgctatatcattgggtatgagtgcagggtctggaacgtttgatatgcaatgtgctccgtatacatatcagattttccctgactggggggggctgctgccgcacattctattggaatgacccctacagtagactttggtctcgactttgagggtggcttggaatgcgcgagatttgggcaaagtgtcgtttgaccaataatattcaatcggcaccctgcatctctatgttcaaaatggtaaatagtgtgtcaatcaatttatttcacatcgagacaaccaattgaaacatcaagtggttgttggtggctgttggtggctgttggtgcccgagccgaaagggctcctggggtcggggattacaggcgatcagtgttccccgcttacccactgtttcccgtttacctataaataaccttatacatagttagcacagaggcttggcatatgttagttaccgtatttagtgcttatgttgtatgcatgcggtcatccttggcctggccgaaataccgaattgagttgagcggtgagcaccaatgagataggtaggttctcatctacccttgaaaagattatagccaattctggaggctctttgaactcatagcctccattttcaatgctgttcttagtatgtagtgtagtcatagattcattaatgatcttttgcgcagtggagtacattaaacattattgcctagcaacccatcaatcaaataagacctaaacggtgcaagaaaggaaagaaaatagcaagcagaacggtcagaacataggtaacagagggaaaaagcaatatagaccggcaagaaatggccaggaataggaatatcaccccattctacccatgaacctgcctctccccacaagacatcaccccggaaacataatttcctctttgctcagcatattacctatcttcttcttccccaacccttcctcaaaggtcttcccatagtatgccaggcttggaccacatacccagccgctccctctggcgtccgctgcacaaagagcacccccatcgagatatagaatacaccgacaataccagtaagagctccctgataccccagcattcttttgccacgcgatagatacaaggaatcaccaagatctctttgctccccggatgaagaggcgtcaagcaacgcattcataccctgtagagtaccgaggacggtcactagagcgagggcaagcgagaaggcactgaaagtgattgcgatcactaacattgccttgtacgacttctttctggatgtgcctgtgcgagcaacgaggagcataattcccgagatgaaaaataggagggcatgaacgagaggaggttcacagaagaagacatcatcttggaggtgtttgaattgtgggagggtggtgttcagaaaggtttgaacgtcggattgggcactagagacttcgtggtctaggtgctcccaaagttcttcgctcaggtcgtccagatcctttcggcgcatgttcgagacgcagttggtgaacgtttgtgcggaggaattgccatcggaagaggatacggcagctgcatcggtgactgatagacatcctcctacatacagttagatgggacggatcttgattaatgaaggatgatttggcctcttgtccactcaccaaagtagcccacccgaagtgagatatcgtaggtcgtgtttgttgagagctcagcgaggtagattttattggaatctgccattgtccaggcgcagctcgtcagaacataaactggatgccgttagaaaatacactgtatcacgcattttgtctaaacttacgacccagactgattgccagtagataggaggcaaccgctagaaacacgagtgcacatatggatttttttcctcttcggttaccccctactataacgcatggaccgttagtattattctcaagatgttgcagtcgccaaaggaaaagtcaaatttcttacttggtttctcaataaccaccgtctgtggaagaggcgcataattcggtgcatactgagtgttcgtgggataaggattataaggagcggcaaggtgaactgcactggtagacgaagttggctttttcttgccagtggacttctttcctgtcttctttaccccagtcttcttcaccccagtcttggccttctttcgtggaagtgttgaggagctatagttctccatggtgtacggtaggtaatgtaatggaataacttcagagcctgcctttggatacgtctttcaggctcacatataccttttatataccccagttaaaccagggaattcggcctattggctggatagtaagacgtatgactggtgggaagtaggttctccccgaaagtctatccctcgtatacggacttggcagaaacgtgtatcaaatgggggccaagcgccatagccctaacaaaataatatcaagcagtagcctagcctcctagctcgtgtcttcgaaaaaggaaatatcgaaagccaagactctcaagcgggcaaaaagaggggtgggctgtgttcagcctcaacacatgcaatttagacctgtaagttgtaggcccgactgggcttcctacatgtctacttttggttgagttagccttggcaaacggaggctactagtatatttcggacgaagtagttcaatatacagttttggtctattgacgtgatttgctcctacgtatcggtacatcgtgtattatgaacatggggtaaatctagctaaacgcactcatcaggaatcgatagcacgtgaaagtcgactcgacatctcctcggaaggttcaggatcaccagacaacctgtgaacttgtggctgatgcatatgcagcaacgcccagctaatttaagacctacaggggtggtggtaagatttttcttcccacgtacgatactatcttaggaagtgcctttatggatactattttggagatatggcaagattaaatcacactaaacatagcccgagaaacgggacaacagttggtcgctttatactccttagaacggtggaggcttagcccgctggtgtgacagccactagctcagcctcggatcattcacctgggcatacggctcaagagaaactagtccacacctccgtaccgctctcccgggacttttccatctgtaggtcataaggccgcgaaatccattgtcctacatatttctccatgcccttggataagagacttggatacgcaacccttccctcccaaacgttttgttgaattttacgtcaaacatggctacatatatggcacccattcctcctagcggacaaggcctaacggcaaggcttgtgcgccaaacaaagattccaaagcccgacaagcacgacgagagcaaggccattgacattgtagccgtccacggcctggccccttgggagtcttatcctgacacttccttctggctgcgcgatttcattgcaaaggacattcgtggggccagagtatttacatttgactacgatgccaaggcagtctggttatgcgaattgcctctgaagaatatccaggatgtgtccagggccttgcttggccaaattgctgctattcgggaggatgtccccgagacacggcctctagcattgatctgccatggcttcggtggctttattgttgaatcggtgggtctttgtttcagcattcctttactggggtattatatagctaacaaattcctggaataaagtgcctgaatgatgccttttcacaattcccaaatacaatcgattgcactcggggaatcatcttccttagtaccccacaacgtgcatcaccagggatcacgtgggcgacgctcttgctgcgttgcgcgagagacagtatacgtacacctccagggctgacacaggctgaactggcatattcgcaagaccttgtgtgggcaaagagaagtggagttgttttatgcgatatctccgagggcttcaaggcaaaggttaccaagaggatgaaattgtttttctgctacgaagatgttccgacatggccacagcaagaatgtgtaagttctaactcacaagctcttgggtaaaaagggtggtatgctgatattgcctatagagtttgaacgagtattgcgcagctcttggtcgtcgtggcgagaaggtcgagttgatggcgggttgtagtcacctctccatggcaaatttccaaagcagggaggatgagaactacaagacaattatctctgccatcaagaagatccgaaagttggcattgaaagacacagcacccacttcatctggactacacgaaacggctcaagaaattcagaacctccaggtcatccagtcatcccaggccacgagtatacataccgtccagaacacttcggtcttgaaccaacagaatttcagcttgcagaatgcagtcacggctacccacaatacatttggtgctcgtgaattaagccatggttcatcgcaaggtaccatgatagcgctcaagaagtcaggaccggcctatggcaacatgcaggatgcgtcaagaatatattccgccactccacaatcctcgcaatttgacgcgaatatgatgaagattcgcaggcgtcctgttggactgtcccctgtcaatcaaatatcaaattcacctggtcacgaatctcagcctaacataccatcacaaaatcttcaatttacatcgggacaattgggacagcaaacacagcactacgccaacattgcaccaatcactgcgctagaaccgaaatcctccaccaaatcaggcaagaagcccaaaatgccacaagaagccggccctccacgtcccgcaaaactaccattgaaccccggagatgcggcacccagaccagcagtcgtccgccaacttatcggtaacgaggggatgctctccacttcaagcaacattcacagaacagaccagcaaatgcattatacaaccataaatagcatggcaatgagttcatcccaacacatctctccgcagcctagttcagggacatacaactaccctccagtcccgcatccattccccaccaatcatcctatgactcttacagctggagcaatgcctgttcaactgacatccccacagaaagtgacaaagccgccgaaggcatcctcaggcgagcaacgccccgaacctgcaaagctaccagggacaaacccgatgccacaccagatgcgccccaataaggttgattcgggagttagaggacctccgatcccgactaccacagctggaaccatacccaaagtcgctccaatgcaggcaccccccaccgtacagcaaggcctgcgggaactgcagctacagcctagctatactcgcctagctatactccaccccccaagaagcccgggttttttaaaaggattttttcgtctagcaaggaatcggcacctgtccctaccacaggaggtcctggagtgcgcccgggaatacaagtcggtccacaccagccgtccgggcagaccagctggggaggctctgggttacactcggggcctcaagtttcacaccagccattgaacccgtccaagtcatccaaacctccatctggacctaccagtttgggtggccctggagtatactcggggccacaagtcggttcacaccagccactgaagccatccaagccttcatccaagtctccacccgggcctaccagtttgggggaccctggagtacactcgggaccacaggtcggtcttcagcaaccgttgaagccgttgaagccgttgaagccgtcgaagccggccaagccttcgtccaagtctccatctgggacgaccagctctagtggccctggagtacactcaggatcactaggcggtccacatcagccgttaaagccgttaaagccgtccaagccatctaagccatctaaaccatctaagccttcatccaaacctccgtccgggcctcccaaactggtcggcccgggagtgtactcggtatcacaaggcggtctacaccagccattgaagccgttaaagcagttgaaaccgctgaagccatctaagccatcttccaaacctccgtccggaccgaccagtttgggaggcccgggagtatactctggatcacaaggcggtccacaccagccattcaagccgtctaagccgtctaagccgtccattttgggaggttctgaagtaaactcaggatcacgaggtctttcgcaacagccgtacaagccatataagccgtccatgccgaccagcttaaggggacctggagtacactcgggatcacgagatggtccatatcagccgtacaatcctctatcacatacgcacttgtcaccctatggcccgccgagaccggggcaaggcccattgatacatggtcacaataataatgaccacttcgggccagggcaacatcagacttggggtcacggtgatggttttaattttgcaccaggtcaaacttctagtcacattactagtaatattccagtcgaacctccagctaagcccacgggttcggttgaacctacaggtccaatcaaacctccaggcccagtcgagcctccagttgagcccacaggcccagttgagcccaccggcccagttgagcccaccggcccagttgagcccaccggtccagttgagcccaccggtccagttgagcccacaagtccagttgagcctacagatccaatcaaacctccaggcccagtcgagcatccagtcgagcatccagtcgagcatccaatcgagcctccagttaagcccactggtccaatcaagcctccgggtccagtcgagcctccagtcgagcatacgggcccagtcgagcctataagtccaatcaagccaataggtccagtccaacatacaggtccggctgagcctataggacgcggtttcactcctgatgagagtcatggccaggcctggaagcccgatcacagtcgcaatcaggctcaccagtcccagtccctgaatcaaagcagtcgaagtggaaatatagccgctggccttgcaggtttagctataggtgcgggtggtgcagcttttatggtggcttccatgggccaaggcaaagaaaatgacgaaagcaatgttaacgatgacaacaaccacgaaggcgatgatgacagtgatagtcagggagaagggggaggtgatagtgatagtgacagtgacagtgacggtgacagtgatgaagatgatagtgatggtcaggaagcagtgggaggttatggtgacagtgaggaagagggtagtgatgggcaggaagaagagggaggtggtgacagcgatgaagaggatagtgaagagggaggtggtgacagtgatgaagaggatagtgatgagggaggtgattaaggaggtggtgacagcgatgaagatggaggtggtgacagtgatgaagaggatagtgatgggcaggaagaagaaggaggtggtgacagcgatgaagatggaggtggtgacagtgatgaagaggatagtgatgggcaggaagaagaaggaggtggtgacagcgatgaagatggaggtggtgacagtgatgaagaggatagtgatgggcaggaagaagaaggaggtggtgacagcgatgaagatggaggtggtgacagtgatgaagaggatagtgatgggcaggaagaagaaggaggtggtgacagcgatgaagatggaggtggtgacagtgatgaagaggatagtgatgggcaggaagaagaaggaggtggtgacagcgatgaagatggaggtggtgacagtgatgaagaggatagtgatgggcaggaagaagaaggaggtggtgacagcgatgaagatggaggtggtgacagtgatgaagaggatagtgatgggcaggaagaagaaggaggtggtgacagcgatgaagatggaggtggtgacagcgatgaagatggagatggtgacagtgaggaagagggtagtgatgggcaggaagaagagggaggtggtgacagcgatgaagaggatagtgaagagggaggtggtgacagtgatggagaggatagtgaagagggaggtgattacagtgatgaagaggcagatggtggatggtggtagtgatggagatggaacgtagccctagttttatatgtccttgcatctatctgtatgtcgatgttcatatctgtactccgtattgacaatcttcacttaatgcgctcatacaaccctaaaacccccagacaattatgtattcccatccttgtttacattctataaaattctataaatccttttgtccaaaataatatacagttatatacatagtgccaatcaggccctatttgatcttcaagccagtagggttattagccccattgcatagctgcgcctgggtcaatgtcccacccagagctcggctgaaggagaaagcagggagcttatccggaagcttctcatacttgatcgcgatatccaacagggtttctgcggaaagaatgcggagtcgaacaccgctcaaatcatagtccacgttctcctggtagctgaaagctgggtctgaagttgaaccatccggcaagggcatcggcccatagccaggcttgagtcttctttcggcaaagttcgcaaggcttggaatatcccgcacatgactattgatagtctcattcgggaaaagtgttgtaaggagttcggcaaccggcatcttgttggacacaaatgctaacagtccataataccggtcgaggactggttgtaccattgcgctcggtaggtcaaaggccttcttcagaacgggcgggttagggtccgcttcgaaatatatgactccgcgcccgctcccacgaggataaatctcctctgggtcgatgtataggggttcaaatggtcgtcggtcatgtaccaggccgccatttttgggggcttcaaccgagcggaagcgaagatcatcgattgtgaaattatgtttttcccatattgtccagtgagaagttgagatcaaagtagtataacttgatttgagagatattatctgatcttccagagccttcagactctcaacactctccttaggatccgcagccgcacgtgcaaatgaccggcccatttcgtcaagcttaatgattatgttgacaagcttttcgcgaaactgatgggctgaattttccctagtgaggtgcgtgaatgctattcctcgccgtcgaatgatggctttgatattggggtctgtggtctcgtggctcgaagagagaccgaactcgtctgctgccgcgatgtccgccaagagcctctggtgaacatcactaagcactcgcggctggtttggtatttcttttttgccgcggtgaacaacttctggcaccagctttaacggaggaagctctctgtcaggtggagtgataatattattcgccgcagctctttcagccacgagcttcctgttgtcatttaagtaatcccagccttgccatcgaagggagttttcagtttcagctggagtggcaatctctatgttgtgcaagcctatggtctccgcaaatacaccagttcgtgtgcgctctgtagtggaccgaggtagcatattcgagactccattgaagggcaatgaggcaatgactcgtacggccccgtacaaattcaacccattctgttctaagcagcttttcatgaagctgagaaaccagcggttgggtttgaaatgatccgtcggagagacagcatcaggcagattagccatgatgagaagtgtatcgttccttggtataatcgcagagccttctcggtttccaggcccttgttctggaagatgagttgcaaagaattcagaccaatcggctttcccatatatgcgatcatcgacgagcttataacacggcttgctcttagcgaggcgtgtgagaaggccgtgaaaggcatgatttggttcaacaagaatatggcgacgtggtttaatgagttcattcagtctagatgagcagaaaccacccccaggccaaaggtccagaatgtctaccggcgggtttcgacgaaggtagggagatacgcgctcgaaaacatggtctgcaaagttcaaggcgtataagcatatttgtacccattgtgtataagagctgagattcaagacttgcctagtagccctggactcacgtattgcggttgatccttggttttcccacgttgaaggcggatcgccgagtaaagcgcctccgtgaccggaaaccgcgccagcggcattcgctctttcctgattcgcctcattataaagatctggcaaatgccaagatgattcttgcgtatggcattaatggaaggagagtactaattgaagggagaaatgtgagggaatccctcgaaatttctttgacgttgaagagcggagagcggagagaccaagcttcccgctctctcatcccacctcttctcccctcaccaggtttatcttccaggtcgcctagatgcggctcccacaattgccgctggtctttccaggtttcggagattcctatcatctcactatgctctttgaggcttgatcctggctcaaattcatcattttggctttctaattctcgtctacccttgccttagcgcaccttttttgttatggcttccaatgcgataggaggtactgcccctcaaagtgttgagcatattacgcggatagcacagaactacgagtacaactcttcagttcctctgcggtactggctgaggaccgccgcgacgcttttacgtgaggttggttatacctgttgcctgcacgtggatatcgattactgcagacttgttgacttttcttcatttgttaggctcacatttatgaacgcgaaggacacgatgagcaagcctatctcattctatttcgacacgctcagttgatcctggtccatctttccaagcaccccgatgtcaaaaagaatgaggaagatcgcaaggcattggtggcagccgagaaagaggttgagaaaaaccttagcaagttggagattctgcggccgcgtatcaataagcgctatgagcgttacactcagttgatgcgggagcgcgaatctcgccaacagccctcactagccaaaaccatccccgaaccacgcgaacaagttccggatcctgctctcgccggcgtggcagagcctttggaagctggagagaatcgagatctcgccgtgcagttagcccaatcagagctcaatcgccgagccaccatccgaaactcaaagggtctttctgggccatctgccgaggagattgaaacacgtcgcgcagctggcatatggagggagtgggaccattctatgaaatcggactctcgcacgggtgatcgcgaccacacaaatcaaccttatagtcaaacccccgaagagtccgagattccttcatcggctgcttctgcgtacaagtatccaactgtgccccgtcaaaagcccctggaacccactgtgtctccaggccaaattgccatactcgataagaatgccgaacgctttgcgcctccgatattgcctcccaaggaacaccttgagcctagccgggcatcttttatcgatgattctacaacggctgtggtgccatcgcgaccggcaaaggtattgccaggcccggtgctgcctgagaagatccaaccttctaaacaaaccaccgccacgcgttcagatctcgatccctcaagttacaccttcaaaccctccgcctatctcgaaaatggcacccccttgcgctcggtattcttaccagcgaacctccgatcccgctttttatctatggctgcttttaacacccgcgccaaccttgagacatgcggtatcctgtgtggtactcttgtttccaacgcgctcttcatatctaaactggtaattcccgagcagacatcgacgtcagacacctgcgagacggttaatgaatccgccctcttcgactactgtgactccgaggatttgatgacgctcggctggatccacacacatccgtcacagacctgtttcatgagctcccgtgatctacacacacactgcggttaccaagtgatgctccccgagagcattgccatcgtgtgcgctccgagcaaaaaccccgattggggcgtattccggctgactgatcccccgggtctaaaaacggtcctgaactgcaaccaaaccggtctgttccatccacatgccgaggagaatatctacaccggggcattgcgaccaggacatgtcttcgaagtcagtggattagaatttgagacggttgatcttcgtccggatgccttaaagaattaatagcgttgcgcttgaattgttcaatacactgagataccatcatcgtcgcattgatctggcttttttcgtgtgacatttcatatcttctagaagggtcatgccatttcaatagcgttaaaacttgctatcatgagtttccaattgaaatatttcctttctgatccatattgaagacatcagcatagagttggtaggttctgctcagatatatagccaagttcaaccttatttgacgacatttatgttttcagtgacaattagtgtatcaaaatactatttagtaagacaattgcaacttatatgtgtatttgatctcattccataggctagagcccaatacttcattgttttctcgtaatcatgccacgccttacaaggatggccaggtgtgacatcttagatttccccacatgataagtcgataaccatctcaacttcccctccgcattcgtacctctaccatcagcttaacatccttcgtcaattgattttgaattgcacgaatgtcgtccccatcacaagaaaatatcccctccgacacccccacctcctccacctccactccaggatcaccgtcccaggcacccacagaaaaaccaccctaccaatccgctgcctcctacttgtcctacccagtcagccacgtcgtctcagggatctatcgccgcatagcagacccagagccaactaaagaaatgccctccgtcatgccatggtcgcggtcctcctcatctgaagcgttcacaccgcaccgaacggcctcacccttccaacccccaccactcacacccctcaccctcgggatccccacaggggccgactcgctccagcagcaactcctgacacgcccactagcagaagaaatccgactgctagtgccgccccgtctgcagctcgccgaaacctggcgtctagcctacagcctgaaccgcgacggcgcctccctttccaccctctacgagaactgcgccgagttctcgcaccgcagcccgcgggtgggctacgtcctcgtaatccgcgactcctccccctacagctccgtcttcggcgcctacatgacggacgccccacacccagactcgcagttcttcggcacaggcgagtgcttcctctggcgggccagcgtgctcccgcccccggcaagcttccccctcgcctcaccaggcgaaggaccccagtctgaggaagccctcgagcgcgctggcctcccccctcccccctcggccgataccactaccgccggccgctggagcaccctgcgcaacgacaagtcgaaacctgcgcgggcggaatcgccggctcataatctcaatatgaatattaaaactaatctcgccgctgcgagtggcggagtcctggcgcctccttcgccttcctcgatccatagcccttcaccgagtggtgcgagtacccccgaacgcattcgcttcaaggctttcccgtacagcggggttaatgattacatgattttctgcgagactggatttctcagtctaggaggcgggtaagtggttgacgttgctagaatatttatttttcttggctaatatgacgtagtgacggccactacggactgtggcttgacagcagtctcgaaaaaggtgtcagctcaccctgtcagacttttggtaacgagcctctctccgatgaaggcatcaagttcgatgtacttggagtggaggtgtggtatgtcggttcttgaacagccgcatatgtacagcctgacgccttacacttgatgtataaagaatgcctgtgtcggagaggacatacgtatggaagggatatctattttgatatagacagggccgacaggagcggactgtggcatccatcgagattgaagacccggatcaggaaaagtagttcatcttaatggcccttcaaatacccagacggcgatgtggtgctggcctccctgcattgttgattctgctattgacatttgccttaatctagtgttgcttgttttgcctaataacttttgtcttgaactttggataattcacacaaacagctttgcttttttgttatcatcaagctagatgtattttctggatggtttcactcttatatggcaattctttcacaataccgtcacttgctactcagtgttaattcagttacgcgtcaaaaagcactactcagatcgaaagtgaggaattgaaaagtaacggtttctattgctgattcaggaattctgtttgaaatccctgaaccaggtcaggaaggctgcttcgaacatggtccacaagaagactgctgagacgacgccgcaggttgccagcccccacaaattgccgtgtcagtgtcttccaatctcctcggtcgaagaactccttctccttctcctccctctcctcatctagcaagtggcgtgtctcggaagacttggtacacaccaagtgcaaccccagtggcacttcggatgccgatctttgatggcattcaaccataacgcttccttctctggctcctcgagtgtgtcaagatgggtgatgattcccaagatccttcctcggttaggatcatacttgtcagcgaagtcgattaacttttgagggcagatgtcgattttggcggagaccacggggaggatgatgcaccgttgattcagcacgtagttttcaatcgtccgacgaccaggcgtcttctctcgacctccattgtcgatgccatctgcgaagaagagcctgggcatgtcgatgagagtcaggtcaggtttatcgggaccagagacctcaactctcatgacatcgtcactgaatccatcctcgagggagaatttgacgagttgcgttgcttgctcaatcagcgcgactgactgctcagtgttgtcgtgaacagggggatcaaatgattctaggtgccagaggtcgccttcgcttattctcgttgggccaggccgatgctcactttgaagcgaggtgttgggtcatagcgtagtatgatctcagtaacgaagccagtgtaaaagtcattccttgatggaaagctcacgccggaaattgattcaataacagagcgtttggcgttggacttggaaccacagatgatcatctgcggcaaatggacatatttactaacactgacggtacggagttcgtcgacgatgtcaaggatactgccttcttctgtgtatgactgaggtggagcttcatctggcttggccggcatggacatggtaaggtttggatgtaataggtatgttggaatgaagatggaacgagccgtatgtatttgatggcaagaaggatgatgaagtcatgaagataaaagatggaaagaagaaaggaagggaagaagagtccatcttatatattggccttatacgtttaacgttaacagcgtgcgattcggcgactcatgcgagtcatagatgatgattatcgcgatgatgcgatgcgatggacggtcatgcgccttgaaatgccctactcccgcgttttctttcacacttctggttaaagctattagtcgtttgttccttgctctactcaaaggtatgtagagacaacaatgctcacgtttctttatccccgaatggtaattagggcattccggactttatgtgagagcaaaatatattggacgatatgctaactttagggactttaagaataattgctgcttagtatctaagacctctgttcgctttgcatttctttgtgaactagagctataaggacttcggatacttctcaacagcctcaggtgctcgccgccttatccagcaaaccacgatcaaagtaacagttcagctgccagatttgtaggccatccgtgccgcatccctcctcggatttgccaatctcataaacaaaggcttggggcagaggtactattccccttccacctttgagatgcaagttgttcgtggtctccataatcacggtatgtttgccagacgtctcatcgctcaaaacgacgattgaaatcacgtcatgtgcacaacgctcaaactgtccgtagagatcgatgtagtaatcccagatctctttggccccatggatgatagaccgatcagtgttcaccagggtcgcactggaggcgtaatatttggttgggggcgtggtcgtcttagcaatgctgaagtccactgcatatttcatgtaccatgagaggactggattggtcgaaaatactgagggtgggttggcgagattcaaaggccctttgaccacggtagtagtgacactcatggttaagaatatacccaattgaaatataggctgtgatcaatggagaaaaatcgtaagagagagagcagttcaaattattagtatctaaaaggaatatcatgatatcaaagctgttataaccctcggctcgtcgtcgggatgataccgaggaacatccgacctcgggacccgtgaatctcgggaatcccgactcaggatgacgtaacccgtattgattcaaacacaccagcatgaaggcagaattgaattgtaaggcagaattgaattgtaaggcagaattgaattgtaatcaggggaccaagttaaattacatttatatcagctatgtaccatggatatcttggtagctttcaaggagctttgacctcgacaagcagttttcctgcgagatgtttagtataaattcattagtgtgcagaaatcaaagcttacctgtgtttacccccttatacagttgcatcaaggcagtttcggcttgggataacccgccatgcacaatggtttccctccgttgcaatcgaccctccgcaagccactggctgagcttccgtctgatctcaggtttcttatccatatgatcgaagacaatgaagccttccatgcgaatccgcatcctccatatcatcatgtagttctttggtcctttgacctcctgttcattgtactgactgactccaccgcacatgacaaatcgagcgtttttgttggcacagagtagagccaagtcgaggacttctcctccgacattgtcataaaagaggtcgatctttccttgcatcaaactcttgaacttttcggcgaaatcttcgctcttgtagttcagtgccccgtcaaacttgaggtcctcaactaaccaacgacacttttcatccgagcctgcgattccgtacacagtggcaccgtggatctttgcaatttgtccagcgatagacccagtcgcccctgctgctccagagacaaccacaaagtccccaggcttgacatggccaacctcaaccatgccccagtacgcagtgattcctgtcaagccaaggacgctgagaaaatcggtcaagtggcctccatccgcaggatcaggcgtaggcacggattccaaagagctctcattgataattgcctgctcagtccaacttaccataccgagagcataggagccaactggaaacttctctgaccgcgaggcagttacacggcccacagcgtagccacgcatgatttcgccaattgcaactggaggaatgtatgaaggtcgatcgtccaaccacccacgcatcgcaggatccagacttaggtaaaggctttccaagacaacctctccatcttcaagttcttccgaagtaggagttgtatgcttttgtacagcaaatgtttccccggggacaatgtttgtctccgggcgctgttgaagatggattgcgatatgttcggaggacatctgtagataaacttgttatgagtatgatgaaaatcaaagcaaggcctgtaaaaccgtactgttcaagcagtcgcttatgcgacaaaaatatatttcaaagaattagaaagcgatagcctaacaccgttgtacagagagagtacgaagtagacaagaataaactgtttctgtggccccttcgacaggacataccgctttatcatcgactacgcgctacctcgggaacatcccgagatcctcggattatgcagccgctttacccgtacggagtaactatacggttggggtgtccctttaacaatcccctatatatataagcttatataagtcatataatgaataactatctacgtcaggatacatctgtttcgatacggcatatgatcatccggcaaatagacttccttatagttcgggaccccccaaggatccccggcgatctagcatcaggcccctaggtagtaaccaagaaattgctacctatcagcgggtacatggttctattctgataactaagacaattgtagtattaaattagccagctgaatgctatgggtccgacaaaagatgaaccatgccatcaaatctcctccttttcatcttcttctgcttctgatccattaccgtcgcctgtgacgtgccgggtcttgcaagatagaagagtgcattaaattcagaataactaagatagggagagaaaggaaggaagcaagttgcaaggtaggaatcagccagttcttatagttgagtcctgaccgctttgtaaaagatgcaaacaaccaactctcgcttagcaatagcaaacaagcaaaaaaacaaacaagcaagcaaacgttggatcgtaacatcgccgaggggacatcaccttccccttaatcagtcacaccttggacaagtagccaatcatcatcagcgagctccgtgtctgggtgatcatgtgttggaagatccaagattaccccagtgtattccttcgtggttgccactgggatgggccatgaccatttcgcaagcatattgagcatgtcataaagcttgcccttgtcgatagtatcaatgtacggcgtgtcctcgggcggtattacggcgtattccttgaaatccaaaatgcgggtgaactgaacatggacttgcccatcaaaatatccagctaggacccgagagtgccaggaatagacgagggtgaaacgtcgccggtctcgatatctagatgatgaaactggatccgaaggtctaatagtttctcatcggagatgactggattgtagtcaggtgagtagaaatacaacgatttcgggtccgaaggaacaggacgtagggctcggagaataacccaaatctcattgccggcaagcgcaggacgcccctggccggtgtctagcttaggacgtccctgatcggtgtccaaattgaaaaaatgatccaggtcatatgaaccagtttccatgttgatgataagcgttagtttgtatgagagtgtagtagaaagacacaaagaatgggtgacgaggctgtgcgggtaaatagaagaacaccaatcggcgtgaaaacgctgctaaaaaaaaggtgagtccttgaaaacgaaatcccatctagattctacgtcagaatgggatactagtcctaattcgaacattcatgctgctgaattcggtaaagtaggttatggtcctcactgatcatcacgtgatggctctgagcaactcagtgagtctcccggactgatatttactcgagcctgactctaagcgccctcataaaagcggcagctatgataggaaagccccaactgacagagatgatctttacttttcgcgagctctgattcggggttttgatatactagtgagcgcatactatttgcagttgacaggaattcggttgggattcggatgcagaggttctttgtgaggtcattctgatgcagagctgtctgcagtgcccctggattgtataagcttcagctactaaaccagatttggtacctgtctatagacatacacttctctttgatcatttcatttcggggtgtctcatcacctactttcatatagtaaacatatatttctctctgatctccatatcgccaaaatggagcaacacgacttactattcattgtcgatgcgtcaagccatgaaaactgctatctacaatcgctgaacatctctctccctcaaataatttcgatttccgatcaaaagattctacataactagggaacgcaagtgccatacggccgtcaagacagctctgtcgaaaccaagggtctcctgctccaaccgtccagtgtaaaaagtgctcaaatcatatgatctggcccgaagaatacaggccttccgcgttcaaagagtcagacttcatctgcccctcttgcacgtcaggccttgtcccaacagccaagatcgaagtcacaccatatgcactatcagccgagaacccatactcctggctagtccaagatgcaaatgaccagcaagcatggcccttccgggacgactccatcttccaaaccatcagtagaatgggtagtgaaggattcctttccagaatcagtcttttcccttcatctaagtcccagctacgctacaatggaaaactgatccacaattctaaggcgctaatttcaatcctccaggaccgagtcgcaatcagcaaagcaagcaacgcaaaatgttcgatgtgtttccatagatatatgtgcttatacccagcctgtggacgggatggctgccgccaaaaaaatgtgtagcgtctgcctggtagtgtggtacaagttcaactctgcaggctgtgtgatcaaccctgcggtgctgggatgtccgttctgtcgtcgataccccactcttcgcctagtagtgaaatatggattgggtattcatgcagttaaatatttttcccaagcagtcggtgggaagggaaagttcatttacgcatggtgcaggaaatgtaatactgccaaggtggtgatggagcggagttgtatgcttagcaaatttcttgaattaacggactgggtttgtgatgagtgtcgcgaagctataaagagaaggcagcgccagacggtagataatgactgacgaggttatcaatggacaagaaccctccaggataagtaatcaatgggatatttcacttgtgaattgtctgaactagctagctaccttgcaggaaaagatctcgtttaatgagtaccacccttgagctccaaactaatatcacgtaagaaaaggactctcaaacaatgggagacaaagtactgaatgtgaagaagaccccatgtacaggagatctccagcggcgttagaagagcagaaaaccccccgcaaagaaatcacggtattggaaagacgggaaagcacaaaacatcagggggtatgggtaatggtacaaaaataggaaaatgaggggccgatgagagactggggaaaagcatttgcagactaataaggcgagttgacaacttcatccctaccaagacgactgctccatccactgcgcgcacggtttggtgtggcaggaccagcgatgctctcgcgcgtaggcttcatgaaggtacgcttggcgaccatgttgacttcgtttggcagagcaacgatgacattcttgtcagagccgaaccggaagttatcagccatgacattctcaccataccgcttgatggtgtacgggtccttgcggttggcaataaccttcttcatactccatgtaatgatgaagggaccggtagcggtgacgatgctagtttccgttgagtcgacaccagtgttgaaacgtgccgtggtgaacgaaagaggctgtttcgtctcgtgctggaactgggcaacgtgtgcgggctgcaagccaagacggcggggttgaggctttgaatccttcgcgaaagcacgctcgaatccgagcttgccctcatttttgccttccttttgaagcgaatcaatgaggagaagataggtacggcaagttgccagcacccagcgtccatctgcggacacatcaagaccgataattggctcgccgagagccgggatatgagtcttagcattgatgcccagacgatcgaacatgcggatgtcacccttgttagaagcgacagcaaggtatcctttctcagtagtagccatagctgagaagtcattcttgctggcgtattgcttgagatcagaatcgacaagcttgttgccagagagacgagggtcgatgcggaagagggcgttcttggagacaccaacgaatggctgcgccgcggtcatttgcgcgaatttctgcgtgtttcgttagtttatccagagatagatttcagatggcgagacaacttacattctcgggagcgaatgtctccacggcgatatcgtcatggaccttccattcgtcgatgattttgccgtactccagatccatcttgaacagcgagttgggatcatctccattctgaagaatcatattctgatcctcagcatggagcatgaccttcttggggctgaagagtttgccattaggggtctcgaccttagaaatagtcgtggagaactcaaggttgttgtgagcggtgtgcttgaagacaccgatcttggacccacggacaacgaatgatcgatcatgcttatagccaactgccagttgtgagttgatgtttccgtctgcgtcacgcgtgacaatatcttcttcctcttcatcgctgtcatagtgttcactgcgctgagcatcgtcctggtcgccatcgtattcctcttcggcctcttcttcttcttcctcgacctcttcctctggcttgtcttcggaatcttccatggtaaggtcctggaaggcatcaagaacataatctctgtcattctccttgactttagtccacttcaactcgttcagctgttcccatagcgcctgcatcagaccctcctggaaccgttcttccgaggcttggtccttgaatcgcaggagccatgagtacgccgagccatcttcactgtagtggttgaagatgaatgaaagatactcgaagttaaagacagggttgatatcggcgacgacagcttgtcctaaccactctttatccttgccagaaatctggagccagtactgccaagtaccaacctctgagacagtcgcaacaatttccgactcctggagcacaaaggttccagtggaaaagtcgaacaaatgcagctcggccttttccttgcagagaatctccttggcttcggggtgggctgcagacggcggggcagtagtcggttcctcctcaagagtggcagtcttgatctggcccttggactgagcgtattccacgtcttttgtcatcgctgcaactgaatcctctgccgtgaaggaatttctggtcggcgaagagaccgggctcgcagttggaatgggcttctcttcgtcgtatgagaactcctgtaactctgcctcggtagccctctgtgcgctgcgacggtgcttgcgttcgtattgacactggagggcggcaagctcgaaagtggcaactttatccgctgggaccgaagagtcgcagatgaattcaaagagatcaccagcgtcgccgctcaggtcatcccaggccaatatctttgcgcctccgtcgcggagttcagagcgaaagtggagggtctggtccaggaggaaaaccttctcgtccttatcgaggccgtcgccggcgccttcctcgccgtcgtcgtccgcaagttcttcctcgccctcttcgtaggctctctggatgacaagctggtattggaagtcctgtccggtacgtcggatcgtggcagcggcgtccttgaagataagctcagagtagcctttaggcgactgtgggcggacgagatacagctcgccttgggggatttcgatgatggtttctttcgaagcgtcaccaaacaaaaatttgctcactattgaattagaagaaaaggcggagatcagtttactagtcaaaatactaaataacagaaaaatggccttatatggaggagtttggcggggcatgaaaagcgcgttgcttaccgttgcggagcataaacatggttgcgaggggcagctgccaaacaaaaattcgtgaggcagttgagaggaggaaaagaggtaagaagaactgaaggaaaaatgagataggaaagagcggaagaaccaggcaccgtagcaaagcctcttctgcctatgagaaaaggataggaagaagcaaaagcaagtcttctcaagtgcaataatcacaatgaaaatcgcttccgtcatagattgcagggtcgtggctgttgtggctaattgctgaggtaagcataccgcctgcctgggcaacctagtccggaataggcaatatgctttctacattcatggctcatggatgttctatcattgttcactgtcttttgttaccttctagtcagaatttacagagctgggaaaggttagtgaagcattaaaaaggaacattaaaaaggcatagcagaactcaagtagatcacaccttgtacacgacaaccgataccagactattgatccaagcttatgttcatccatggatatctcaaccgctgactgcctccctttgggcattaaaatatgtacaacatgttcgttggatagttcacactattctttctcttcgttttcgtcctcgcttccttcctcaaaagctgcaatctcctctagctgtttcatctgttctgcttcggcatcttcttcgttcacatcttcatcaccattctcgacatcttcctcgccccgcttctgatctgccctcaaagcgccacctttccggggagggataaccttcatgaacgccttgccccagtcacgaagttccaaccactgaagcataatctcaatgacatggttggtggccagtaccggacgatgggccatttgaatgtactgcccgataggcaatttggcagttttgatgccctttgcaaccgcttccttgtaacaaattgccttgtgtcggtttttatccactagcgctccaacaatataagtgctgtaaggcttcagctcagtcagagtattctcactatcactgctgagatatatgatttcaccgtcctcaggcttcgcatcagtttgttcagcgaacggtccggcgagttgtcctcctcgcggggctgtcatctgttgtttggccagctcgccagcacgtacaaagtcatcctgtagaaagcgaacccgtttccagttcttgtggcatgccagtacggtgtcaaatcgctccttcagtaatttgttgaatgacgagaatatcatgtgcccattgtagagtgcgcggctgttgtctgagtatgagcgcgtgagctgaccagctaatgagatgcgctctctatcagacatcagatcgtcgtagccgcaatccatgacgaatgtaagaggtaagagtgttgacttggtgtgcttggcttttttgccccgccataagaccaggagcttgttcgcagcttcctcgccgcctttttctcgtgcctctgcaatcatagctttgcgacgctctcgcttttgtatgatcttgtccttcttctgggacttttgaagcgcgcgcttttgctggtgagcttccgcacggcgtaatttcttcatttgatttttcgacattacagccggggccccctgagcatcttgagttgtaggttcattggcagtttttgtatccttgtgaactgtgaattccgagagatcgagaggttcgttgccaatctgagcgcacgcgggctccggctcgttgctggcaacatcatgagcgccagtcatggccgggctgagctcctcgtgggtggtatcttcgtcgtgatcgagtttggctaattttcgaggccgctcttgctcctccatagtggtatagtggaattggcaagcaaaaaataaaggtgggctgtcgactgactgtagatcaaaagttcaaaaagcgcccgccccgaaactcatcgaccaatgacctgcgccgcagccctcattactgtgcacaatccacgtgactatccagacccaacttctccaatcgtcacagcgactccacgctatccctctaagccctttacccgctcattaccgtcacaatgcctcaggatatgcccccagcggggggctacgctcaagtccagtacaaggtaagccatgcaaccgagtttccgggcacccaaggccctgcgcacccagcacacagacatccaagctaacggtttcgtttcttactcttcatagcggaacctccctgcccgcggcttcaagcccgcctactacatgattggcatgcacgttatcatggtctacggtttctacaagtacttccacggtgtccgtgagcagcggtacgtttcatccagcaagagactcccttcctgcctccgatcgatccgagagaacgaactgcaattggaacccgatgcgaacctgctagttgaagaaataagcgaattcaatggctgatatgtgttttaacgatagtgagctggcccgtgagaagatgtggtctcgtctgcacctcactccgctcctccaggcagaggaggaccgcgaccaggtccgtcggcactacgccgacaaggcgcgcgagaaggagcttcttggtaccgattccaaggtctacaactccgaccggtatgtttcatgaaagcgcagttggacgctatgtcattctcggtttatactgatttcgcttgccttgacagctttatccgccctaccttcgcctataccccctccagtctcactcaatagacagcctgacaatgtcacccttattctgagcgatattgtacctccgttacctccttttgactctgtatgatgccggtgttttgggatgcttggttgggtgaccccttgcctccatggtatacggactgaactgggcttttctgatcgtttgtgggagagctagaagcattgtggtggaagctggggtgaccttctcgaagcgaattcgaggagaacattgtagatattacttgcctagtgatggcttcagtttggtcttttgcaatatgtcttatttctttgctcgttcaaaatcttcataccctgttagaactacaaataggccgatagtagagaaagttatatatttgtgtctaataatatgtgttttttataatatcgtcttgcgaagcgccgctgcttgctaacgacgggggtagttgataaagctgcaacgcagatctagacagaaagcagggcgaaatgtgactgcgaaaataggagtcggaccgccaatagtgtacagaatagagagggaccattcatcgtgtagaatgaagattaacaggcccaatagcaccaccgcatatcccaacctttcgcagtccagaaagcagatgatgtttggcctatccaaatagatcagcaacaccaccaagatcgggaccatcattaatatcgacacggtggttctgctgctgagtctccatctcattggtcatgtacctctcctgcaatgctgaacgagccttacgacgttcctcgcgagaacccagcatcttcccttgctcggcaatactgatcccacgcaagggctcaagaagatccaagactaaaccacgctgcagccttggtgaggtagtgagatgaagtgctttttccgtattgatcactttcgctgcgctaattcctggcaaagtcaggaaaacagcacgaggggtctcgctgcagaagctatagagacaccaaattgatgcaattagctgagccaggtccttttgcatatcgacaaagtatgattcatgtacggatgaaatgcacgctgtgaggacatcagtacatatgaactcgcggatggtcgcgatggtttgggtgtcctgggtatcgttcgtgggcacaaagtcttgcagaattgaccgaatgacgcgggtgataatgctaccgctacgcgtatcgcgcatgcgaagagcatgcgtacagaagagcatgactggctcaaagatctggggggaggagaggacgaaatggcggatagaatcagagaggttcggtgtcggcaggggtgcgctaggatccgattcagtcccatctgggtctgagaagtcacgttccgtcagtatcgagtggtttatctctattcgtagctggcgggtcagggagtgtttaccacctctctgtggatcgaatagactggctaccatgatcacagcagagtaagtcaactggcgaaggacactttcggacttcatctccgtagtgagatctccgtccgaaattccattcctgcgttgttcaatgatttcccattctgtggtgactttacgatcaatattcgtgaacaaagccgatagcatgggaggcaagaattggctgcggaattgcacagggcagtcgtcaatcagacaacgcgagatgttgagaagaactgagaactggtgggaggatagatgcggtgagtcaacaaataatgcttcagataggggtcctgggagttcggcaaatccatagaagtgctctcgcatcctgctcatgctgaacagcatggagtagcatgcttcgcggacagctctgacttttcctcgaaccgatgatgcaaacccttcaagtgtagactttgatgttgtgattctggcgtagaactcgtcgcggctaccgatagaaataccagcctgccaaaatcgatctgtgaggatacgttcgactaccggttgcatgccttcgaccatattccaattggcaggattgtggaaggcatgggcgtgtcttagaattaaaagttagcttggtggcatgaatcagcattagcataaataattacctgacaagctgcagcagagtgggaagaatgagagggatcaattcgtgccacatatcgcaggcgatcacataggctggcgcagattttttgactcgatctgtggaaacggccaacatagtcttagtgccacgcaatggcaacagctagaatagaatgaatcagattggccctagcacggggaatgagatttgtacttcttacctggaactttctggtcatctcttcttggactaaccttccttcattatccagtgcaacctcggaccagtctgccagtttctgtgcttgtttagattgcatgtatggaccgacattttccagtccaagcatattgcaaaacccgggaaaagtggagctactctggcgaaattggtcgtcttgccatgactctcggatgggttggaggaatgcttcaagtcggttttggcgcagataaggatccgcattgattgcgcgttgcctgtattgagtcagtatgaagcaattttagatagagtagacaacaggaaggggaagaggagttacataatgatgagcaagatagaagtcaattccatttgcaatttatcatcgacacggttagccagcgtgatttctttgatctttggctcgagaaggtcatagaaggtctgcagtgggcaaggttagagagtactggacgatcgggatgtggaacatgacgtacgtagaaatagtctgcataacgcatagccaaccgacgaagttcagagcttgccaatccatgaagctctttgacagcctcggaatacaatgggtattcagaatgatctggtaggcgtgacattagaatgtgttccagaaccttgagcgcaaatcctggatgattgtccaaagcccttgaagagatgtcgacagccaatttgatgactctttgtttaaggaccggatcctatatgaacagatgagttgagaaatcccttgggtttgggaaatatgacatacctcaaaagaccttagcatcagacttgaagcccagttttccaccgcatgttctaattccattcgtttagattcctgtcagaattagcaaccgatgattcattttgcgcttcatcctcttacatcacgttgtggtgcttttccgtgagccgaaacccacttgttgtagcccttgatgacagcctctaccactgcgaactgagcatccgctcgcataagaggaatcgaggatttggtgaaagtttccactgtaaaattaatgagtcgcaaagtccatagctcattagattgttgacactcactgctgaatggctcaacgccgctatacaagttgtcgagattggtgtccacccgggccagaatttcacgcaccgcttcttggggccgcttgaaggtgataatttcgatgatcgaggaacagtaacggcggtaattgccaacaaatgcatgtcgctcgggaactgtatcaatgtcctcgagtaagaactgcaccgtgggatcatcggattcagtcgggagacactcccaacgaagaagcctctgggtacaaatgttcaagaagtggggagtttgttcttgcacaaagtccatgttactgatttttgagtgctgtaacagtctggaccaaagatgcaagcaaggtatggagaccgtcaggctctggtgttgcatgatgttgaccatgaattgcaggaatggcggcaggttcaaacggtccatggtagaggccaagaacttggcatcttccaggcatcctgcaatatatgagaccatctcagagagctttttggagataagatatttgggatcatcaacgtcatccggtccgacgattgaccattcgtaaagcccctgaagaacaacaaggtattctgactcaaaaatcagacatactaactcgtgggagtcttcagttccgatgttggtccttccataaagtgcatgaagtgcttcgattgcagagagaaccacctgctcatcttgacaaggcaaagcccggaaaatgctgggaacaacctgggaggcaatgacagctttatagacggaccatgacaaggcagatctcaaggtggccagagcctttatggccgcatcacgggcctgtttggagctagagacattctggacgcaattgtcaagaaattcgcggattcgaacgagccagccctcctcaccacaacgtggaatggtggggttagttttatccccagtgatttgctctacgatgcctgcaggggtaaagatctcgataagcgaccgattgagctcacctccccgtagtgacgaggcaatatcttctcggaaaaagacatcctcggaaagagtctcaagaacagcgaggataagctctttatgaacgagagatgcaccccagaactgaaccatgttggcatccatatccatccaatccagcccccaggtcttcttagcagcctcggcccacagctgggagatcttatttcggaaataggcagggtcttcggggcggacgttctcggcgagttgcaagatcatcatgcgtaaggtcttggcttcttcgggattggtgaagttgtattggcgaagaacgtgatcgaggagagtcagaccgaagtatcggacaacgggctcatactccatacgagaagccaaaaggaagccatttcgcgctgcggaatcagacgctttaaggttctccacgaactgcgaagcctcctttcgtatgtcgtttgacgatgcagggttgtgaatgagttgcagggcacggattatgtcggccatgccgccttccgacaactcctccgcagccatcttgtcgacgcgttgtagaagaatttgatgaacaaaaaagttaagtctcaatcccgtcctaatgtagtaggccgcgtctcatagctcagagaagataggtaagactcgtccggtattagtttagcagtcggacaccgcaatggccatccacacgcgccactcgctctttccgggtgtagggtggttcgaggttgaggaccggactcgaagttatgaatcgatatatttgcaatgcacgtagttggcgaagtagggtcgcgaaatggatgactcgcagaagacaattggtgacttgtcggctgagaattttccctgaagatcaacaagggcacaccgctcacccgttgatgctccgctgagtccgctcttcctccagcactggatagatgactcaatggagatatttcaatgttaaagaggatcagctaggtaacgactcgtacgatattttttggtttccttgttaataatatatgctgatctgcgtgattttggtgtcatcatagctagagctatgcccctcatcattgtttatcttatctcccatacccggtcgttgtatactccgacagacctgtcacatatatatacacttttgagtgagcatcaagatcggtcggaggaccatttgatgcccttggatctgaagaggcagtagaaattaattcaatataatgaagcaattgatttcaaattggcaaataggaacttcaactctcgagatacaactagcaatttcacattatgacacactggcccttctggcattgttccagatagctgacatcttggcctccaggattagcaaactccccaggtttgcgcttaagtccctcaatcttgatatcctgttgtccttcggcatgccaccatcgcaggcgttgtagcttgacaccctggatgtcctggacgtcaatgtcccacttgccgccgctgactgcaaccacgatgttactccctgggaaatggaactcaggaagataaatttcggtcgggccagtcgcggcggttgctccttcagccgtcagcgatagagtaaaggcacaattcctgagatcgaaaacatgactatccaactttccgctcacgtatgttggactcgggcggatatatgcctctgcggcacgatagccttgctgtcgtaaggatgactgggagaggtcactggagatcgagggagttgacaaagcacctttgagatcacgaggtccaatatttggctctgttgagctactctgactttcggagtaggccggggaatgggtgtcaagtgggcaggtggtggatcctgctggcagttcgagatcgtcgcgagaatatatagacaggtcctcaccattccagtgatcaccccattcgtggtcgttctacgccgtgtcagtaccattcatgttctgaggggcaaatacacctacttgcgtgacataaacccacagagtaaagccattggaagtactgccctccagtgcaaagtgatttgcatccatagcgctggtttggctactatagtctccagtcttgtacgcatttttgtcgtccatgtcatatggaatcccaatctccgtaaataccaccggatgactgcccatataaattcggctttcatcgcggaggaacttgagctggtcacgcaaacagttgcgaatggccgtctcgccaactttgagcgcaaaggcaggggtgaggtacttgccccggagaacaccaataacatccacattgtagagtcggttcctacaggagtcagtactgccgacatccgattgaagtacctcgaccagagcttaccaatgttttgtcaaaagagttaatccatcatagaaatgaaccgcatggaccatattagggtcgtcatcagcagtgccgttaagatctggcggtacctccatcacaggtggctggcagaacattattgcgtccggccagattcctcgaatggcatttttgtatactcggtaatgatccaagaaatatgtgttggtaaatctgtcatagtcaagtggctcacccgtctgagggttctttgagaagtaatctttccgtagaagggtgtctgtggccggatcccaaactccatgctgagcccagatgcactctccaagtttccacccagggtctcgttgccagccatatttgctatcatcgtagtcagttggcaaccaggctatctcgcctgccgggtctacaaggtttgtgccagtcttgtagggaccgaaatttccaaatgcccatgttgtctgttcgcaagccttgcctgagccggtgagcattgcttggaatgcggtcggtgaagtcccaagttgaagttgctgctccggcggaattactgaaatgtcttgaaaaccaatgatgccacgatgaggctcattcatgctttcccagccaatgatcacttcgccatcaagatcacccgcttcatgaattcttcgtgctaagtatgcacatgcatcaataaagtggttctggagataatcttggatgttcatcccatcgatgattgccttaggagcgaaatcccgcccagcccaaaacaaggtaaacatggtttgacaaaccagtctagtataatttgtgctccagatcatcttggggaactcggccgggacatcgtatgtgttttgtaccaaggcggcttccgtgtctctgaagcttttagggtttagtcccgctgcatagagcgtccacatcggtgccccagatcctcccgagaacctagaccactaagaaggggttagcatgaagttgtaagctattaagctattacccgggtgatcatatatactcaccacatcctgatgcgggtccataaagacccagaaatcgtatttcttagctatccggagaacttctatggtgtatgcaacccactcatggtcgtaaactcccggtcccgcatgctcaatggcttcccaggtaaagatgtacctgatagtgttataaccccatttccgaagccgtttgaaatgaatatcggcatctttcagtgggaagggacgtccaacaaatgagacattgtccccgtcaaagaacttctcggcaatgtatgaggggatgtcgggtgtctttgggtacttcgcatcagccgcaaggtttatccctcttagcgtaacctcccgattgtgaggatctcgaaagctctgtccctcaactctcagatgtagaggggccattgttgctctggttctacctaaggtcgagttgaatgaggtcgtagtgtcacgcgggagttcaagggtgggcaagttgaagaaacgaagtatagaaagttcacagcaggtgggtctgaaaataggcaacgctttccgattcaactcgactagcaatattgaaatgcgaacgagcgaatcttggtaacctttcaccaaggtcacaagtgccaagcttgcccgatacctgcgtgcaagtcactagaacacgtgattctgaccacttcaagaaacctcgcagaatactttgactcctcaagttgtgttcagcacgtcttctgtgatatcttcaaagtgattccttcttttatctgtcaatccagacgtccaacccaacagtgagctcattgccaactcgaagatcacctgtgtccacctttgataacgataagaagtgacgtatcgcgagctagccgaccgctttgctccaccacgacagattctccccgctgtctctgcacaacgggaataatgtcgagcaaagcggcattgaaagccgtgcgagcagctttggaatcgaaagattaccaaactgctgctgaaaaggccaaggagcttatcaagagcgagccgaataattaccacgcgtatgacaatccctgatccttcatgaaacatgactaactcggtttgttatttttttctaggaatgtcttcctcggtctcgccagcgatcgattgaataagaataatgaagcggaggacgcttattccgctgcgaccagtatcaaccccgacgataaaacggcatggcagggcttgatctccctgtatgagaaacagggtggctgcaacgatgatggttatcacaaggcagtcattgctctcggaaagatattcgccgacaagtatgcattgattccttcttaattcctgtgtacgaaaaacatagtgctgatgacttctagcgacgagcaagaacgctgccaagatctaattaacaaatacacgaagtcgatgaagaacaaagggacctctcaacacaagcatgcattggaacttcagataccgggctcacccctgtacgattttcttgaggggcggttgccccgtccatcccaaacataccagcgattgatcgagattaccgagcgtcaagaaagagagtttatcaatcgtgagattggagagcgccgaacgcgtcttggtgctcgcatcgaacaagtcacccaggaagttcggagggaagcagcgaacaagagccgattggaccaattctaccaaggaatgattgattggaccaacgacgatacagtacgccgtcaatacgaggagaagttgtttcagcgtgcatatgaggaactcggagttctgcctgacgccgagaagggggcgaagagagcagccgtttttaaggcagcacatgacatggtaatcataaaacatccgttcgaacccgcatggaaagtttttctggggtggcaagatgttcaggatctctcccagtatgacgttggccatctgcgtgagtacattgagttctttccagaatctgggctctcccaggttctcaaaggattcttattgagcgaactatcgccatttcccaaggagccaacggacgaaacaaaaggcaaggatggcaaggatgggaaggaaatcacagccaatcaacccgataatgaaaacgatgacgatgcaactgttacccaagaccctctcgtacttatggtcgagggcttggattccgctcgcgattcaattcttgcccaccgcataatggcagatgtctacctctctttcgaagagtatgagagcgtggtcaatgttgctcgtaaggggctactgtacatcgagaacttgataaagtacagtggagtcaagatccccaacaccattgatgccttgaacaacgcacttgccaatgccatgatttattatcaatccccccggtatcacgcagatgcgaaaaaaatatttgaggacatccttgaacggaacccaacctcgtccaattgcctacttgggattggtctgattttgaaagaggatcaggactacgcagaagctgtcaacttcctgcggcgatcactagcacgtgattcttctaacctcaagattcgtggagagcttgcttggtgtgaggcattgcatggtgaccttgaaggtggcctagccagtcttcaggctacgcttgaggatctaaaagaagctcaaccggacaacagagagttcaaatctgagcttctttaccgcattggttactgccaatgggagcttgatccgtccccagctgcccgcaaagatcgcagtcgtgcttatgctagcctctttgcttccatccaggcgaatatgaacttcgctccagcatataccattcttggtttctactacgcagactacaagaaagataagatcagagctcgtagatgctttcacaaggcttttgaactgtcaacctctgagattgaagccgccgagcgtcttgctaggggctttgctgactcgaaggaatgggaccttgtcgaagcaattgcgcagcgagtggttgactccggcaaggctaggccttcccctgggtcaaaacgccgagggtttagctggccatatgcggcattgggttcggttcaggtcaacaaacagcaatacagcaaaagtattgtgtccttccaagcagcgcttcgactcaagccaacagattatcactcatgggtcggtcttgccgagtcctaccaccactctggtcgatacaatgccgccaccaaggcctttgagcaagcaaagctattggagccagagctttcagctaaagaccaggaatatgtatggtttgcaaggtatatgctggcaaacgtcaggcgagagcttggtcagtacgatgacgctatcgctgcctacgaagatgtcctgaaatctcggcctggtgacattggtgtgactctcgcgcttcttcagaccttgaccgagagttcgacgaagagccttggcctaggtctcttcaatgatgcagcggagctcgcataccaagctatttcggtggccacctccctagtgcagattaaaagcgacattttcaacttgtggaaggctgtaggcgatgccttctccaacttctcatacatgaaagctaaggctggaaagctatccgctcccagctgcaaggctttactggcagtcgatctggaccctatggcccttgatgtcatgaccgatgttgatggtgtcggaactgattggctcgcagccaatgaaagcgaagagtcgatgccagctgaattctacgttcacttatccataatcgcatttaaacgtgcgctgcatatttctgcgcatgatgctcattctcaagcagttgcctggtacaaccttggttgggctgaatatttggcctatcgcactgtgcagccggatccaaccaagaaaggtaagaagtctcgcaagttcctgaaagcagccatgcggtgcttcaagagagcaatcgaattggaggcgagcaattccgatttctggaacgcgttgggtgttgtcactgcaagcatgagtcccaaagtctcccaacatgcctttgtgcgaagtttgcatttgaatgaacgcaacgcgcaagtttggacaaaccttggagcactatacctcctgcacgaagaaggccaccaatcatacaagacgttcttgcgagcgcaggccaccgacccagactattcattggcttgggtcggccaaggcttcgtatcacttattgttcgcgagacacaggaggcgaggggttacttcgagcatgcctttgacatctcaaactcatccgatattctcactaaacgccagttcagtctgacccactttgatcatctgaatgcggcctcttcatctaacgtgtccgaactcattcagccattcttcgcactgcaccaactctgcatccaggatccgtcaaacctgccgtttgtgcacctttctgccctgttagcagagagaatgggcgagaccgctgatgccgagtctagcctggaggttgtctgtgcaggcatggaagacgagtttgaaaagacagagtccccggcttccctttcgaggtattcccaagcaaacgcagatatggctcgtgtcctccttgcacgccattcatatgaaaaggcagcagagaaggccgagctcgcgcttaccctctctggggaggaagacgcagagaaattcgatcccgaagcttgcaagaagcttcgtctgtctgcgcatctgacagctggtctagcatattacaacctgaagtctatggaccaagccatcgatatgttccgcgatgccctcgaagaggcagacaatgctccagatgttgtctgtcttcttgcccaggtcctgtgggccaagggtggtgaggaaaaccggtctgttgctcgggagcaactgcttgactgtgtgatgaaccaccctactcacatcggagcagtcacccttttgggtgccatcgctctccttgatgcggaccgggacgccattgaagcagttgaatcagaccttaacagcatgatctcgcgtgatgacatcgatctccacgaccgagctaaaatcatcaaactcctgagtgccatctcagcaacgggactcaatgataatgcagccgttcccgaaagcatcaggcgcattggtgatgccactgctgccgtgatgcttacaccgggccaacctgccgggtggatggagttgtcggcagcatcgcgaaacccgtacgcagccgccatgactatcaaacgcgctctgcgcagcgtgcctccttacggtaatctcggggctgaggacctcagtcaagcctactcgcaaaccggcaaggtcggtgacgccttccgagcgatcatgattgccccgtggaaacgcaatggatgggaggaactgagccacaatgtgcctacccggaacatgtggacacgctgtacgggccataaatcagaggaatcggacgacgacaaacctctcctgccatggaagcgccgcacaggccatggacctgagtagtcggacgacgatttgactaccctgccactccacaacaacaagcgccgtacaggcgctagggctaaatgaacttgatgcacagtgtatttagttgaaatgtacatcagcttttagcgaatgaacatcacaacatcaaattcataagaaatatatccacaatagactaagagaaatgcaaagtccataccttaagattaattgcgaagtagaagaagcacactccgccatctgttcagccggttgagcccacgatgactcgtgtttcctcattccccttcggcgcctgcggtcttctccagcaacctagccttcctaccctccctccacggtttatccaaagcctcgatcttccccccgagcagagtaacagaccccggggaaagcaacaccatacctctcgcgacagacggattacgaagcaagagcttcgccccaatagcaagtttctccaatgctatgccatcgatacgctgcatttcaacagccaccgccatagttcccgccgcatcctgaataatcaggcggtgcggcccatacccactgttcccggatgcagtcgcagcaccgttcgaaggattgttattcgcacgattattctccgacgcctcggggtcctcgcctacagcgattgtgcgcacgatctcacggccgcggatcgcttcgccccgctcaacgcgttcaattgcttcgatctggctccataggctcgtgccgatgtcttcgatgtctagcacttgcacggggattgagccttgcagccgtcgctcttggaccgccgggtcgtgaatatcgactgggagtacgcatgatctgtgcttggagagtgattctctgatatcagaggcgaggagacggaatatagccgtctttgtgagggcggatgcggggatattgcgttgcgctgtgctggacgataataggaaggcactgagccagggttgggcgactgagagggatttggtgctcagtatctgagctgcaatttgatcaggactggtcatgatgtattggactccctcaggatcatattggcgcgtatggttattctaagggaactatcgaagtcggggaagctctcaacgtgaaaataaagcacagaccaccgcttaaagcaattgacctggcccgactctgttacccccgacaactccgacacacctcacgagacatcgcaatgtcgaccatatcttctccacgccaatccctcgcctcctctagagccctttccccgggtccagcctcctcccgcccatcactcgatgccttgaacaccagcgtcagcggggggctcagcgccgcatctaccccatccactgcacgagctatttccccctcactccatccccgacgcaatcgaagtgccttgcgagactattacaatctcaagccacctggggcgggcacatctgcctcccgggacgcatctcgcactcggagtgaagcaggagacatatccgacccagccagtctagcgtcagggacggagctcgacagtgcaaacttcgacccgcagcggtatgtcgagcacctattgtcatcgtcgtcgctgtctacggtgctcaaggcggagaatacgttggttggggatatccgcactctcgacggagagcggaaagcgctggtctacgataactactcgaagttgattcgcgctgtggagacaattgggaaaatgcggcgcagtatggatgatcgcggtgcgccgttgacaatgacgaaaacgctgggtccggctattgcttttgttgctgagactgccagtgggcttattaaagaaggcgaggagcaacggcggctgatgaaggaagccaagctggaagatgggacttcgagcaagaagagtgagaaggatactgttcggtgggtgctttcttcaccgcagagattagagaagcttatggcggagggtaaagaggaggatgcgcaaaaggactggaaagagatccagcatttactcgacgcttggggtgaggtcaagggggttgctgaggttcggacagcgtgtgagaaagtcatgaacccggcacgcaacgatgactgagcacctgcttatacatacctttcttcggccatgatccatgtgattgaagctcttgacaattgacttttgtcgaagtgagctctcacttttgactggaacagcggttgccaccatgaatgagctggctcattcatgaagatagatcgttcctgatctatacaagacatgatcagtcatttgtcccgacgaacattctacgaaatcaccgctgccccggcttttgggaatgccttggacacacaacctagacagagacaaatacagtacatgtttgaaagtttgtgcgctaatcctcgccgagtcacggctacgtttcctatcacctacgacgtcgtagctgagacgacgaaagcaaggagcccatgtgagcggaagagaaatgctggaagaaagatgaatttgcctctttggagaccacacgggcagttggcggctaagtcctggcggtaacgttcgcacaagcgtctaacgttaactcgccatcttcgagggcagacgcccaaaccgtcaactttgtttccgccttcaaccatgcagaaagcgcggtagtcacctgctgttgggcaaaggttacatctaaacagcgttccatccaatcaaagcaaacttctcgagcctctgtgggcaaagtttcatcgagtccatatatgatgaagcttgcaatcgcattcagggactttgcagtcgtaaaatccttggtaactaaatagccaccctgtggcatgagcacaacctgccgggatgaatattgcatgtgatgatgtcgtcaccagaacaacgcctccttccagttgatgcgccaagctgaagtaactttgcacgctggccgtcaacggtcttcatagcattcaaattcttattcgtggcttgggtgtttggtcactgaccaaacattgtgcctttttgacctgttagcctagtgatgaaactcaagcaaccgcatccctgacactctcccaggcatgtatcatatagttcccgggagcgactgtaggcgatcctgggagtgtactcactccgaggagcttgaccttttactcctaggatcatgtcacgctgctcctgaaaattgcgcgctgctctgtgaggatctcacgtatgcgtagttgaatgatcaatattgaggaagctattgtctattctagatacaagattattttaaatacaagacatagcgcgaggaagcgaagaaaggatgcctcttcctccgcggtctcattggcaaagctttctcttgctcagtggcctagccttaccagcagcctttcggcgcgttcaactgcccttgcagagtcgcactggacgaacttcgtaatgttcctgccctttgcaaacgccattatgatagcagccattaagacgaagggccagtcttccacccttggctccccatgccggtttttgttcaccgcacaatgaacttcaatcattctctcaaacttgtccagccacatacacagccccggctgcgaaagaattctgaaaaatatctggactgccacaaaaccccgtactctatcgcatgatggagtctggcccaacttgttcttgtaattgaccatgattcgagggaccgaaaggagaagttggaagactggcaaatgtttgagaaaatcaattgattcaaaacaattagcttacgtccgaggttttcatctcaaacgatgtcataggtctgagaggacgtgagagcttcagccaaagctcattatccggatcatcatcatcaatatacaagtagccagtatccgcgctatcaccgtagactccactgtatgccctgtactcatcttgaatcttctgcgcagtctcagttgacagccacatatatctctccacaattcccgggtcgaccggcagaccgccatagataccaggggagtcccattcgcctctgggatgctgcccccaaggaacagccatatcagaaaacttgacagaggaatgggtcaaaaagtccctgggctccaaatcaggccccaaactcgttttcttggtggtgtcataagggtcgaactctgagatttttccgcttccaattgaacgctccctgacaaactcctccagatattgcaagtagtaagggtttctgctctgtttggcagcctcgaaataggactcacggggagggggattcaacgccatgaaaagcgattggtagtcacaaagtatggaggtgatcgcaatttgcggtctcatggaagggcacttgccagccagctcacgcaaagtgttctcatgaggccgcacaggccaccagataagccaagggaggcagtcagagtcatcgtcaaggtcagagatatcattgttcatgattctacgagcatttatcgcagtgcgaatctcgcgacgctcgcgctcattgccttcgctgagcaatttacctgggagaatgattcgcccagggttggtttccagctgataggcccaccatcgggcaaaacttgtatggtgataaatcccacgaagaatacaattgtattcaatttctgttctgagcctccgtgggtgcatgaatcgagcgtatctatccacattaccctcccatgcagccatttgcgttggaaggcgtttgtcaagaactggaagatcaggcgaaagaggcatccacaaatcctccgagtctcctgggccgagtatcgcatcgcgatctatttcaatttcttcctcgaacccaataaatccatcttcctcgatgtcaatatcatctgcagttgtatctggcaagttctctggaggaagaacacgctggctcaaagcccgtcggggcttcatattgccgtttagaaatgcgggtgcttgtgggcttgtaagattaaccgatcgagtgaaatcatccataacagcccatctttgaggggccgacatgatgattttgaagatttcggcgtcttcggcagcattacaggcttcttcagcaatagagacgtctggcagaagatccaattctttgtaaagatccgtatacaaagcagcagcacacgcgcggccgacttggtagcgcatagatggataccgactagcgagctcgcgataggtttcttccgatgcaaactctggataccaaatgcagtatggctcggtggcaggttgcatatcggggatgacgttactcatgatcaggcgagcattgcgcgcgcgagaaaactgatgtgcatcgtcgccggaacatagctcaatgattgtcgggcttgttgcaaattgaagtgagtcacggatcccgcgaatgactgctctacgatgccaaaaagaggtcacatcagacgggactttttcgccctttattgccgcgatgcattggtcaaggtcgtactcagcgggttgttgcttgcccgcgtggactgggaggtccgtggaggaaatgacagagctttgccctgcaacctgagtagctgccatgaggataaatagcgcaggggacgtcaggctgacgatttacggaaggggtctgcaagaacttgaggaggggaaaggcggagcgtacgcaggaacataggggccagggttactttcgtttcggatttaatgcatacaatggtgccttcatgtcttaatttggatacctgaattacaattacagaggcgtgtctgagaattaggcccataaagctatttctgccatacaaatccatatatcgcatgattcttagacgatttgaacctaaattcggaggtaatagcgatccaatgaattatggatatctcttcagagaaaataatacgtatagattcggggtgttaaaacttatgaacagtcactgtacggatactgatttgtaattttacagtacagcgtatgcagggcatgcagcattgggggccgcatgcccaggtggacactaatctgattacatggcgaataagacaaagaattacctaaatatttgctggtacaaccccaagcaaagacgatctaatccgaagaaagcgatgataatgcaggtacctggtggacagcagagcgaatgacggacgtgcgtggcagaacccgtgtttactaaatcctttcgctcacttcgttcgtttcagggcacaactaccatacatacactgggaactacgtttcagttgactctgatgcggtgctttgattctggctggggtctatttaatatgagagaaacatactagtagctgatgaacaatcgatgctggcaagtactggggctcgttactactggtaatacatcgagatgtatagggtaaaacttactagtagaataacaccacttgaattgacaactttgacattcttgtagggactttccggcaagggaagactttgtaaataacttcggagatatatctctgagaaaacagttgatgtccagatcagatcttccatgtcagaattctgttctatagagccccttcctatatggcgggcacggcacatttgtcccaaaaactttcccagggctttatttcttcccagtgcagaacattattgtcagtgtttgccggaccaccggtaatggcgttgcggttcccaagttcctcgccctatgtaccagcattagcgccctgcgagatggtctttgagagaaagcaacttacccaagccataaacttgtcccaggtggtaaggcccttgcctttgatcttttcagtgttggcggcaaatgttctggggaagtcaactgcttggtatcgtggcatgcctggaacatcggtatctgcttcggccatcacaacggtgctgcgatattcgccttttttgttgggatcagcttcttggaggttccaaccctggtcgctagatagctctctgaccagccaattgtttgtctggcccttcctaagagccacaattcggcgggaaatatcctcggcgcggccaagacgatcagaaacatccccaatcgtgatcagatgcctatcatccttgacagccgcgaccttctgactgacagttctaataaatcggatgtgcttatctgcgtctgactctgagtcacctttcgaccccgagcctccccctccacttcctccaccccggcctgagatgaaagtgctggccttttcttccaactcagccaacttgggactgattgtcgatagtgaaaccgttcctttgaagttgtagactctattatctgccaattccttttgcgccctttggaggtccccttgagatgatggctcagttatggcaggaggaggctccagattagaaggtttactgagcgttctgagcatgaattccacataattcagaggcttgtccgtctctctgccgtttgagtccagatgtcggttacttgttcctgcgggtcctcttctgtctcggaaaggaaatatgagcttttgtctttcggcggtctgaatttggctgtatgaaagtgttgcaaagttagccatgacaacctgtaggtcactcgaaatattactaggacggcgaaaataacgtacacaaaaatctgataggcttcccacatgaacattttttcataaatatgcgcctgaagattgaagtcggtgcctttataattgttaagttcgccggggctgactcttcgatggtgggtgtgtgaatgatgattgggatgagaatgggccgaacagcttaagcccgtaagagaagcaagccatattataacgagtcccagaaaagagacctgggatgcccggaagagcatattgacagttcccaccaaagatagtcaagtggttcttgaggtaaaagtaataaggaaggactggaggatgacttgaaaaacgggggcagaaaagaacactaattcgttttatgcgatgtcctattgccccctctcccaaatgaaaagctccaggataataggttctatttttacggctcgattttgttcgaatttcggctttttggcgattcatactagcaaccagtgacggtcgcgcattgggcaagttaattttacttcgaacccctgaataggacccagactggagagaaaaaagaacaaaaacccgaaaaaagcctgaaagaaacctgaaatcaaccggaaagagggaagaggcgtgctccacgaggtagtcttacatcgtacaggtagagtgagtgggacgctgctatgaccaatagtgctcatttatggctcattatgagaattcctttctcaggtagtcccatcagtctgccagcctttgccagaagtccaattcaagcgtagaacgcctgaccgctgtattccgtacgttcaaatatgcgaaggtggagatgggattagtagcgggacttccgacaaaaactatttcaaaacttattcttggtcttatcttctataatttccgagcgccgcatcttacagggaaacaccgaatatcaagtgataagtgctgataacgtacttcaagtgtattcaccaatttaccccaagagagtctcattgctgctactctcagtcaatttcgccaaatcatccttcatgggaagaactattccatggctgagactcgatatggagtccaggcccacacgggaagtctctgtagatcaatcggacgctagtgttcacgcgatctgctgtggatgtaacctgggggcggaaaaaaagcaacttggggggctacagcccccggggccaaggctggcatatacatattagtgtactgacgccgcgaatcatttggacaggcctcatggattgcctccactctccatatagatcctgcggaatacctgcggactgtctcaggtacccggcagaggcttaatttcaagttttattcgcgcacgctatcgcttggaattagtctggcaatcgaaaccagccctgcagccccaagaccctgtatttgaggctgggactgtcgtttccctgaactaaagaccctaatggggtagccataaaagcgtatgaaacatccgaatgtctccacttgtactagtagtggtcttggcattagactctgcgtacggagtacatactagcatataccaatgtactagtctgggtatgaaatttcactctttctcatcgagaaggttggatccgttgaggtaaatctcctttcaaggatcagctggaaagttctggattggggcgcacgttccggctttattccaaagtgcatcgcggtacggtcctcagatgctgtacgggctgatgagcggtcatttgattgtcattagcttcataatggttgacccaccggaatccttgaattcccacagcgtatcgttccaaatttgtcatttgtcgtcaggtttgctcttttccaaggttgatataaatgttccaagcctactgggaacccgggcagtgatcagcaccacagcactttcaagttcttttcaagtttacgttcattccaggttatcgcctggggtagtatttgccttcattctttcacgatgaatactgcccttggggatttcatcccttttctttccttgagttttctctctcttttttctgttacaaatgccttcacccacacttcagcaagcttgaatgtcttgcctgcaccgggttgcccagagtcctgctcggttgtcggctcaaacccgagcaattggacctggattgttcgccaaagtgatttgagcatctgtgaccagccaatcctatttgatttccattttggagacgactcgacttctgattttgttgtacgctcctgtgctgtcctcgagcctttccacgagcagattccaagctcgaatatcaaagaagcgaaatggaccaatatcaacgtcactgattcggatgctgtaacacagtcgttggtagtatcgaattcttgtggagcatctcagcaaacttcagatgtgaccgttcaagtgggccctgctggtgctatcaaggataccaatgacgccaatgctgctgttaagaatctagcatcctacatgacaaatgtcgcctcctgtggcttcactgttgttctgtcaaaggttggagaaaccgtcgctgcgctttatgccggagcggatgtctatccaagcagcgttggcccataccttgacagctttaccaaaaaccttgagggcggatctcagacaatccaatcatgcgactcaaactcaaagcaagacacgactattggaatctatatcgtggattcattggatgagctcgaggatatccaacgcgtcttcaagacgtggtctaaaggcgattgtcttagcgcaaacggtgaagactcgataaaaacaaaaatcatcacgttggcatcctctggagtcagcaagcggtccgacatcttctcatcggtcgaggatctcatcgccccccggggtaactgtaggactatacaagtcaaactgggagatggctgtggctcattggcaagccgctgtgatatatcaggagctgatttcaccaagtacaaccccggtgctaagttttgctcgaatttgaaggctcaacagcatgtttgctgctccgcgggcactcttcctgattacacccctaagcctcaggcggatggcacgtgtttcacttacaccatccagcccaatgacaattgtgctgatattgcagccgggttttctattacccaggatgagatcaataccttcaataagaacacttgggcatgggctggctgtggtgcgaacgatctaaagcaagaccaaatcatatgtttgagcaaaggtaacacgcctatgccagctccgctcagtaatgcggtatgtggtcctcagaagcctggtaccaaggctccacctggggactataatggctggaacctcactgagcttaacccctgccctttgaatgcatgctgctcagggtggggcttctgcggtactacagaggagttctgtaccaaatcacccgccaagacaaatgctccaggagcctttttgagtggtaaaaacggatgtatttccaactgcggcacaaagatcgtcaacaacgagcatgctccagacaagttccttcatgttgcttattatgaagtcttcaacctcaaacgcgagtgtttgaatatggatgtcactgagatcaacgatgcatccttgactcatgtgcacttcgcttttgctggactgactgccgactttgacattgcctttgacaatgacgattataaagcgcagtttgaaaaatttgtcaaaattagcacatcctacaaaaaggtcctctcatttggaggatgggctgagtcgactgacgccgcgaccttccagcgataccgtgatgtcgtcaagcctggaaatcgtgacaagtttgcgacgaacatgctcgcattcttcaacaagtataaaggtttagacggtatcgattttgactgggaatatcctggagctaccgatatccctggtgtccctccaggcaccggtgatgagacgaacaattaccttgctttcttgaagctgatgaagaacaagattggagataagtccctttcaatcgctttacctgcttcctactggtatctgaaagcattcccaattgacaaaatggccgagtatttgtcgtactttatctatatgacttacgaccttcatggacagtggggtgagtttaccacctatcttcccgatcgatgaactttactgatcatatatagattatggcaatgccaacgcaaatgtgggctgtcccggcggagattgtcttcggtcgcatgtcaataagaccgagaccgagaacgctcttgtgatggtcacgaaggccggtgtacccgcaaacaaagtgcttgttggaatttcaagctacggccgcagctttggtatgatcgacccgagttgcactggccccatgtgcaaatacggcggttcctttgatgtttctacggccgaggctggacagtgtaccaacacctctggatacatctcaaatgctgagttaaatgatatcatgtcgaatgtgaacgcaagccaggaaggctacaagggccgcgtgtggtatgatacggaatccgcttcagatatgatggtttacggtaccaccggaaaaatcactacgtgggtggcttatatggccgatgacaccaagaacgaacgcattgactgggtcaaagggctcaactttggcggagtcactgactgggctgtcgacctccaacagtggaacctgggcgtggacaccggctctgaagaggccaaggaccttcaactagccgatcttcctaaggggtgtccttccgacaattggccggacagtctcgataagctccaggctagcatcgattctatcgatgtagaatgtcggtctcaggctgttgtttgggttttgcttaaaacaatccccacagttctgcaaaactacaaagatgcatctgaaagctatgatgaatatgttagttcaaggcctttttgatactggtgcaatcaagctaatctgcttctagttcggttattattccgaatgggtcaaggacaacatcaacgattcccttgagaagtttatgtggggtgatggaatgaaatacatggactgtaaatggacagcggacaaagcagatggtggcagtggcaatgatgcttgtacaaagatggttgttaaacagggacaaccaagtcaaggcgttgtcactatcacatatacggtacgcgatgaagatgggttttacaacgcgcttcagaacgattacggtatcctcaaagactggattgtgtgggaggagacgtcgggagatccggaagacgctccttgtccctgtccagtaccaggccactgcattcattgcaacaagccccacggcgaagtgtaccacaactggccacaaaaggctgccgatgatgctatcaaggttcctaaccttaagtctgtgatcgacactgcagtccccaacatcaccgcacttcaaactgtcatgctcggaagtttcacggagatacgtttgggggccatggatgccaccgacgcagacatggccaccgcgtacagcatgcccgttttcatgcttgcagacacgaccgagcaaatgaagaatattaccaaaatcggcaaggagcagaaaaaggccgatgatgaagcgaaagtcagcttcatcttggacattgtcagcattgttctcatgattattccattcgctggagaagcagtcgaggcaattggtggcgtggcaaacgttgcccgcgctgctttggtcatgggcgaggctggtaacgcggctctttccgtctacgatattgtcaaggatccatcctcagctccttttgctatacttggtctacttatgggagccgatgcctcgatcgtaggcaagtctgccaagactaccttctccaaagccgccgctttccggcatgctatgagtgacggtaccttgaagtctttcagcaaagagttccaggcaaatgacaagatcgtgcaagacattgtcaaggcttgcaaagcctaaatttcatagtttttgctctctatggatgccctacagggtaggcctgaaaggcagctgctactcacaacaaaagcctaccaataaactttaaatcacatgcttataggaaatgcaacaattattgatgcattctgacgtgctcactgtttccctatgcagtttgtagccctttatctgtggcatttattcccttttctttctcttctctggcagacagcttgccgaccaacgtgcagcttgccgttcagcttgctgcgttggcattttctttatatgtctgcagatatgcttcttctgttttctggtggatggaatctggctggctttgtggtgcgaagctatatagacaagcttcagtacagtagttagtttcccatcttccatcaattcatcattaatcgtcaatcaattcttcaatcataaacaaactcataatccctatttcccttcaagaagctcccgactcgaatacatactcgccttcagtccatactcattcttagaggtaatatccagatgagtgaacgcatcagacttgtagtaaatcgacctcggccctttcccaacaagcccaagatcatccaacttactcacaacccgcttaacatcctcgacatcgccgaaatcagccgtatagacacaaatcaaacgactcgctccagacccaccattcgtagcaactttcacagcatccccgagctcccccttctccatcgccctaacaacgacgccccagaactcatcgacttgacccacagtcggaaaaagcatccacttcccatttgtaacacccgtctccctcgccagatccagaatatccttctcaagttccttccgcagcggattcaatttacgcgtcaacgcagccgtagtcttcgccccagacctatcatgcgcctcgcgcagtatcgcactcccattttcgtactcctggagaagctccctgcctctcctaagcagagcgggaacgtccccgctcgtcttcgacggcagatgcgggttgtacatccaaatccaggggcctacgaccgtggtttccgtcgtcgatggcggaagacgcgataaaaagtgatctaccggctcggtcttcccgcgtttgttgcgcggcatgctgtctgtttctggtggtgcatcgctcatacaaacgtctggtgatgtcgcctttgcgcgagtcgacgacgcgcggagatgctgctgcatggtggatagcagctttgggtgagttcctacccagaatggctctgggtcgtaggatgagacttgtgcttctagtttggtcttttcgtcgtcgtcgcctgatatggattagctgggtttcggggatgggttgaatatggaatgggtttaccgtagaagcttgattcgtcggagaatatttcatcggttgctgtggttgatggcattacctaggcgtcgctggatgatattatgatgctctggtggttcttgttgagaagtagttggagatggggggagtagttgagaagtagaggtgggcccgcatttgaatttcccctctcgcgactttacgagttcacctgttaatgtctcatagtaactaatactttgatttgaagtaataggaagactaatttaataagtatatgaatatgacactctttatgcattagctatccacagtctttgaatatatttatagcagcatatattctactatcctacttagtcccaacttattcggctctgttaatatcaattcatcaagcctttctagtgccgtgaaatgaccaccctataatattatgtctaatagtacactaggcgggtagtaggaaatctccaattggggtctttagtcgagagccttttactatttacacgccttatgctgtatttgaatcgcaaagcaatcgattattttagcaaatgattcttaagtaaagtagagtagaattttcaatcccccctctcccttttaaaagtccgctgccaccaggatacctggggggcgggcttcaatttcaatgggcaaaagaagcaatttgccaaatatatagtgtaagccgaatattcttttagataggtgccttcgttcacaacatccacattcccgactacaacattcacctcgatccgaacaatcctggaccatttcttcgcgcataaaccagtctgaattacgcctgaagctatagtagaggtctttggagtccaagtgaaacctatactctgcttggtaaagggcgtgctcctttatagtttattgtgcttggatctcttcaagctgcttatttgcgttctcaaattcagttgtatcagagttagacttcccatttgattcgatagccatagcctttggtagagctataaccttatgttgtagccattcctcacgctgtattacttcacatagagcgcgctcggtagttaagaaataactcagtgagtttagaccgaacgacgtagtttgacccgtatcttagatattcatctttttggtaaaagtcaaaggttgtaccaccgaagaatcccataatcgtatttagaaaagctgtaaggttagtatggtggttacacgaatgcagaccgcattgaaacaaaacaagacctcggccaatcaaccgatgaaccgaaaggacaagcatatagagataccatattaatttacacaaactggttaaacatcacaaaagacgccacaaaagacaccacaaaggacgtacataatagtcgtatcgccccggtggcatattcagtcgcccgtagacgttgtacaatcggcgattcgtggttggtgaagataccgggatccaccttaccccgcgaggtataaatcggcagtttctctctctcttgggagcacacaacaatgaccgagccaaagactgagagctcgcagctcgccgattgtagtcatattccgatcatcgacctctcaactttggatagtccaaatttcgatgagcgacggaagcttgctcaatcgatctatgatgcttgcactcaggttggcttcttttacatcaaggtgtggctcttagggcgctcttgaacctgatcagctattaattttgcccgctcagaaccacgcaataccggaggacaagattaatggcatacacggttccgcgaagcggctcttcgatctccccgaggagcaaaagatgaagttttatattggaaactcccccgtacgcctggaaatctgaagttcaaaaatacatcctaagattatactagaaattccgcggctacagtcccctaggtggtgagaaatccacagggacagacgatgatcccattgccgaagaagatgctgtcagcgctctctctgaagcctttgacattggatacgaaactgcaatggatcctcaaaaatcgacagatgaccctcttccccgtgatccctacggactgtatggagataatcaatggcccagccaagatatacttccaaacttcacagagacctatattgaatattgttccatgatgctcgggctctgccgaaagttgatgagaatatttgccctcgcattgggcttgcccgaagaacactttgatgcgatgactaagaacccaggtgtcacgtctaggatgatgcattacccgcctcagccagtgaaggaagaggttcgtgaaggactcggggctcatacggtaggcaattgaccaaaaggcaacaaagataccgaatgatttacttatccgctgtcaggactttgaatgcttcaccattctctcacagggtagtgtcccgggcctgcaagtcttgagccacagtggtgagtggatactggctccgccattgccaggaatgttggtcgtcaacattgcagattgcctgtcaatttggtaagactagctcggtcattcaggagaatgcgtgctgacttatttaggacgaataaaaagttcaagtcgactattcatcgggtgacaaacttgactggacaagaacgttattcgattcccttcttctttggagtcgactatgatacaacagtgtcagttctaccgaatcatatttcggatgatcggcctgcatgtaaagagcccttcaaagcaggcgaggtgagtcatagaatgggttgagtaccgatgtgataactaacgagggaatagtgggttcgcgaaaagctatcaaaggcgtatgttggctatgaaggctaggatactgaatcttattgagacataatttccatcttgcttgccctgctaaacttcagtcatcctgcactggaatatgttgttcaaaggctgatcacttcttcccaaataattaatcccaaccttcaatcttctctaaatccaaccctaggaatccaactagccccggtgaacaagaggagtttgtaagcatagtcgcggaaccctgcacatgacatgacgcagttgcctgatcgagctatgtgacaccagtgggtccacttatatatagattaggtagtctcctcccgcttccctcttctcttctcctcctctccttgtcgtccatatttagctggatggataaaagctacttacttcgcaatgtctttactattcagttctccaccctctaaggcgacggcctcccttacaccgttcaaggccgccatccctaaggccaaactcgtcgagctcgagacgttgataaagatagcgaaagtagcaccacccacctacgagaattcccaaacagaccaccgttatggtgtcaatagggattggctagtgaacatgcaggatcagtggcttcggtcttacgactggtaatgatactacagcccaccatatgtacatcccaatacatgttgagactgaattattatactaggaaatcctccgaggatcgaatcaacagtttccctcagtacactatggaggttgaagatcttacaattcattttgtaggattgttttcggaaaagaaggatgctgttcctatcattttgttgcatggatggcctggtgggtctatcttggtcttaacctcacaacaggaaaatgagcaaaacagagactgacatatcattaaagggagcttcctcgagtttttgcctatactgcagaggttccgagaggaatacacgccagaaaccttgccctatcacttgattgtaccttctttgcccggttacgcattttcctctgggcccccattggatagggactttggaacaggtgacatcgctcgtgtttttgaccgactgatgaaaaacctcggctttgagagcggatacgttgcccaaggaggtgatattggaagtcaaattgccaggcgtttgggcacggagcatgaaagctgcaaaggtacggaaaagtcatggtattccttttgcggtgattgagccttctctgacaagttgtgttatagctgtacacggtaagtgcttttttcatcaaagttatttaaagactagaatacgaatatcagctagtcaacgcggttttcatgaaaaagccggacggcatgacagacgaccacctgaacgcctttgaattacagggcatcgagaatatgaagaaattcataactacgggcgtaggctatgcgattgagcacggcactcgacccagcaccatcggacaagttctggcatcgagccctcttgctctactagcgtggtgagtcgtgcaaagcgaagcgtagtcagcagaaatcgcaaacctgacacctgcaggattggagaaaagttcctggattgggtcgacgatccgcttgccctagaagacattttggaatctgtcaccttgtactggcttacggagacgttcccgcgggcgatctatacttacagacaggtgaatttccctattattttcgacttccatcagcagatatctgatgtgggtaaatagagctttcctgcgccaccggttatgatcgccaatgaccctcgttggtatatccacaagccatttggattttcttctttccctggggagcatgttcgactgccgcgctcgtggattgaaaccactggagacttggtattctgggagcagcaccagaaggtatacgatgtggcatttgaagagccgagatttgatactgacgctgtttcattatagggtggtcatttcgcggcactggagaggcctgatgaattgaaggcggacctagtcaagtttgtagatcaggtgtggccaggtattaagagagccgactaagttgagactaataagtagggcagtagagcatttgccaattgagttaaaattgtctggagtggaaagtattcaggaactgtgagtagctgatgcaatattaaccaatgagagtatatttagtcgcccgtcaacgtcgattccaatagtaacattaatttaaactacgttcgcactttgttattgatatttttgcatttcattttctatctcatatgtactccgaggcaaatcaaccttactaaagtactcgtatcacaataaacgattcttgggactagttcgaacgcatattatcaactagccaatgtttaaaccgaagcttcgggggcttcaggtgaggctaaggtatccaaccaaagccaggaaatgacggcctggatgaggcaggtaatagctgcaccgggtgagtaaattgaacgatacgttatggaaagcatgactcacctagtgccacagtcatgtaaaagaagccaactccttcgaatagcgagccagtcaatagaggcccgagcatcattccgagactatatcctacttcagtcatggaaaagactcgcaagttgcttctgttggcctcgaatagctgcgcatctttagtttccatgtccttgacaacatctattgaaagtcacatttgttagtggaggaacgaactacacaaaatgtgatcactcacaagccagttgcacggctcctacgccgcgcacaagaggtaggatactacccaaggcaatcaaactggtggtaaaaatagactttccagctgcatctcctccggcccatgggaagtgggagtctccgggcatccctagaagtaagatgagagggatcatcgcaagccagccgaagacagtaggtccccgtattccgactcgatcgcgaagccatccggatggaccgctgagaaggatattcgggacttggagacagaagaacatcatactaatgagtaaactcttccaaccgaatgcttgtcgcaggtggacagggagagtgttgttaatgccagacatgagggaggagacaacgacgacgttggccaatccggtcaaaacacgtggatcggagagcatgattctgtagtactcatgtttgaggtcatgcttgttctccactttacagtcatctggattgacggtagacggtgcctcagaaagcagtgcagtcgtctcttctgggtccacctcattgctgaccactgacacaacaggcttgctcaaagaatcaattttctttgacgattcgaggccaggctcaatcattaccaggcgtgcaatgatatccaagacgagtacgatcaagggaagtgaccaggcggcccagtagccaaataactggagcaatgcgccactcactgttggtccgccgaccattcctgccgttacaaatgacatggccatgcccatcgactgtccaaggtgttgcttgtccacattatttgccaatagagcaaatccaaccacccaagttccggcacctgccatggattgcaggatgcgaccaaggaagagaatccaaactgttcacgaaatcaatttcaaataatcatcatcaagtttaaatattctcataccggatggggcaagagcaatcataagggtccctataaaacatcctgccagggcgatcaatagtggtttcttttggctcggagtcttctcggcaaaatgcgcgacaatcggggcagaaacgagaccaatgaacccatgagtggtgagcaatgccgtagtgaacgtctgagtctgtgatggatccaggtgcagtcgttcttcaagcatataactcaagatcggagtaagaaacccgtagagaaatgtttctgatggatggttagcatgactcagagtgagaaccgtgaaacaaccacacacctgcgaataaggcaaccgtgatggacgaaaccaccaaaaggcgagatgaacgccacctgtagccccatggctttgtatccttgtccattttaatatattgagagtttgacaagagaagaatgaaaaagtggggggcagagaagaaattagttaagtagttttcaggcgctatgatcacaaatagaatcccattatatcaagctagctcatggagataacactattttcgatttcgtttacgagccctgcatgtttagttcgtctttctagtgccggcaatggctttctattggtaatgcagttcagatcgtgctcgcgtctaagccgaacaccctgatcgatacctcaatgcgcctctaatgcacctcaaatgcagctacaaggaaggcaacacggaaatcacaacgagtgtgtcacacttagagttcacgccctttttgcagatccgtcttatgtactatgtactatgtacaagcatacacatcctgcaatggtatcccgaacagaacttcaagagctcacggaacatttacatttcaatcgcgattgatccacttaccccataagtgtcgagctattacgcaaatctgccaatgtatctagacgcacatagcccgtcggcaaccgtcggacctgccgcggtcttatgtaccaagtatgactaggcagatcaaagtagtatcggcaccgtagcttgcgtgttcggtcctctgatctgaaactggtaaacggctgaatcctcacggggtagaaaaacggggtctacatgcaatgcggtgaaacaatgatagttcgagggataagccgcggcgtgaggcatgcatgagacagatcttactgcaagtccaactttgagggtgtatatcatcttaaattctgatagtaatgtattgttctattcaatatatattttctctttggaatttacttggtaactccaaatgcaaccaatccggcataccatcctagtaggaactatatatagcgactataatgtagtatcggttctaggcaatcgctacaaacagtgagtcttattggtgggatactccgaaatggctaagaccactcatataaaacgccaagtatacttagtacacatccagactatcctctgtagacgcgatatcctcgacttcaaggtggatatctcaccgccccactatgtgatttttgactccaaatcctatcaacgcaacagattgagagcaacgagattgtcaaaggatctcatttcgttcatcgtgtgcatcgtcggagtggaaatagtgtgtcacgcgacttgaacttttgatatacgtaccctgtcgcggtgacattgtcggacatattcaagacgccacattccgccccctccggagtcgacagctaaactccgagacttgcaagggctaaaatcattctaaattcggactagagcaaaatgggaagcattcaacatccccagtcggcgactacagtctttctagaccagccacccagttgcctggagttctgtcccgaggccccagactatttcatcgtgggcacctaccttttatcagagaacaaaactgaagatggaggaatcgagcagtccaaaactgggagtctacaactatggaaattagaccctgttagcaagacattgtaagctaaccgcaatcaatcatattacctagtataacgccctcataacaaacccactaacagcacttagatcccaaatccaacgaattgccctcccatacgcagtctttgacctgcatttccacccaagacacaagaacctattcgcaattgcaagcagcgtgggatcagtggctctattccaagtatccaactccaccaccggagacgcatccgcaactccaactccaagcatcaccgagatatggacgaaacaagtacacgaagacccctcaatcccagccctatttctcgcctgggcaccgcaaaactggttcccgcagctcgcagccgatggcttcgccgtcacattctcagatagccggacagccgtcttcgggacagaggaggacatccgccaagaacagagtgtagccgaatggggtacatacgaagccaaacagatgatcgaagtctggtttgtcgcattgtccacaagcaccggaagcccaactgcgaagtccccgatcccgttcatgttcacggggaatgacttcggctcgctacacacgcgccgtttcgataataccgccgagttggatgatccggacgagcatgtctcgcccatgctgctcgagcatgatgatcgcgcccgccaccacactgctggtgtcactgctatcttgcctcttgatgttcccctggtcgatgatgcgccggttcttctgacggggtgttatgatgagagtcttcgtgtgtaccatgctacgcggaggggagaggttctcgctgagcaggggcttgagggtggggtttggcgactgcagttgttggatacgacgaggattccggccgaggatgatgcgtcgaaggtatccgagtaccgctttctggtgctggcgagctgtatgcatgccgggacgaggcttgtacgggttacgtgcaagtacgaagatagggctccgaattgggagattgaggttctggcgaagtttactgaacatgagagtatgaattatgctagtggcgtgtgggagggtggacaagatactactgagatattgtgcgtctcgagcagtttctatgatcgcaggctctgtgtctggactgttgatctatagtcaaataaaaagccatgccaaattgggaaggccatctagacgctgagactataccgtcagcaggtcccggtttgtcgactattgtaatgctactggagattcgtaagccgaaattattctaacatgattgtagtcatgaacacgctagagaatgcacgatgcataagcgacaggtatacaagtacagccgcgcccgaagacaataaaagagtcattcatatccgaaaaaagtatatcgttcccattgagcgtgtaattagacaatagtctccagctcgcgagcgtaacccaaagcattctcaataacggtgccgctagccaccagaatatcccgctcagacctagcagtcgcctcgggctcaacagggaagtatatccgaccgtcgcggaggatccagccgcgctgcttggcaaattcgatcactgcaccctcagactcgaggaagaggaggttcttggcgttggaaatggggagggaggggtatgccttctctgagcaacctgcgatttcattgcggatagtaccgatgagaacctataaagcttatgatcagtatgcttgccgacagagacattgagctcgagctgagcacgcatgcaacttacatttgaaaacagaccaaagtcttccgacggaacacgttcggacttcgtctccctccacaccttgtcatagcttccctccatcaagttgcgctccagctcaactggatacttgatgcacgcatcatcctcaacactgccacccttcaagcacgcctcttctaccaatccctctagcactgtgtggaagttggcactgtcacccatgctcaaaagaagaagcagatacagccccgtaatcttgctgcgctggctagtgctgaagtcgagtttcgaagagccctgcccgggcagaccggcatgtctctcaagatcgtagaatggctgcagttgctggtagtaccgtgtgaatagctgcgcgtcagtctggcggatggaggcgagtgctccgagttcgaggacttggcgggcaaggacgacaagctggggaggtgtggaggaagtcggaatcaaagcattttgcataagaagagctcgcttggaacggctgagaaggtcgttggcgacgtcgaactgtttgcgctcgatagcaccgtggagctctgacacaagggactgtagatcggacatgatggagattgtgtgggttcagggcaatactgaaaggaaataaggcagcctagccggtgtatggcaaaggcagtaattaaagcagcggaaacgatagagagtttggattttgattgatgattgttggcgacattccgatgctcatgacggagctgtggtaggcggtcagcgtgcagtcacgtgtgggcattttgatagtcgctgatgatgacttccactactaccaccacaagtcaggctatataatatttgttattggattgaaccaaaagatggcccagtatcttgacagctatatatactattcaaattgatgtctacgcatggtcatccggcaatgcgtgtcccggatggcatacggatgttttagcctagctagaacaggtatggcgcaattcaagcttaggtatccaggaaaatagcaaaaggtaaaggtagatgcatatcaactcgatataattctgagaaagtaattcgtcactcatcgcaggcccagtgagcccggcaaatcgagtgacacaacgaacgtcatagaatgcagtgacaaaccttctgatatatatatcaacagcccatcgagagactgcctgtatatgtactaattatgtactaatatctaaagcatacatcaaatttatactcagtacaaggtgatatgcttctgtttgactccctgggaattagagaccggaaattatcaggatccagctataagctgtcaatctaacctcatgaacagtctcatacttgtccgacggaacaaaaccttacgttgcaatggtttcaggctagtgctcccactgggtatgatcagccctcagggctcagagcttctcactctttgtcaatctagtaatagaaaacaatcaaaacaaaccatcccatatggcatcctcgattttaggaacttgctacctctagtcgttctccaacatccttgaagggtaacatatatatgtggtacagtacagaatgacgaagtataaagtcaagttgatggcctgaaatctactcggatcatctgatttccgacctccgtgcgatgcgggatgatcgacgtcacagtgaagcgcagtgagtatcgcgtcaatctgacttcaaaataagaaaatttatattggatactgtgggattgactttaatacagctcgacttctcggatatccgaacttattctggattttgcgcccaaggtgattcatataaatatttgaatgtggggaaatacagagtgccaatcatctatcgcaaatcagctcgccagaattcatttagcttcaatatcgtgcggggtggtatgatcagctcagatcaaatcgacgtcattgctacattcccacgtatctcacagagcctcgaccttccccagtctttcatctccgctttcaatactgaaccaacattttgcaaacgccatggctgaagcagaaacacaaccacgtcgactgtcggcggataaccaatcagtttcgaaagccgatgtttctatgaaggaacgcttcttccgctacttccagcatgagatcaccggtatgttcccgttggtattcagacgctacatcattatcaagccacacaatttcaaaagacccttgctaatgacattcttctagatttgcagcaggagatggatcggcttgcagatacgtctctcgtgggtggtgaacgtgccgatgcaacagaccactgccttgccgggatcgtacggttatccaatgaggtcaaggatgcagcgagctatatccccacttatgatcagagggtgtacgcagaggtaaacgcgactcacaatatacccaatagagcagagctgacataattacaggcaatcaaggctttgcaggatcgattgagcgaaatacgtgcaacattcgagccccgatccaagtttagcttcaagaacaagaaaaacacctctgctgtatctttgtctgatgctgccgtgctggcagttgaaggacggcttagcatccctgggtaccactctccaggtgcctcgtctattgactcgtccgccaaccacacacccaactatccttccaccccactgaacgagccagacaagcagcaacaagagcgaccggagcttgcgcccacttcattcccaggtggcccggtcggggactttagcacaaattcccagtcggagaatcctccccctggtgcgtttgcggccaccggcgtatcctctgtgtcggtcgatgaccattatggccttcatattatgcttccggcctctgggtcgtcacccacagtcccggtatcaatcacctccttgaatcgctgcatcgtggatatgtccattcctaccgccaacggaaagccatacgccagtctgactgccaaagggatcaaagaaagcttattgatctgtggtcaagtcaatggccccgcacacatcaccggtgttaagaatagcgtgatcgtgatctcatgtcgccagttccgcatgcacgactgcagcgacgttgatgtctatctcagctgttctagcaaccccatcatcgaggactgttccaatattcggtttggtcggatcccgaaggcctatgtcagtgttctcctcgtcgctatatcttttgggtttaacttacattcttctatctaggctttgaggcatgaccgtcccgatcacgaagaccgttggagccaggtcgaagatttcaaatggattaagcaggagcctagtccaaactggaggctgctcgaccccaacgatgccgttcctgaagaggtctgggcagagattgttcccggcgggccgggatggtctcttgaggacatcttgcatgccattaatgtagtcccaaactagttttatccgcttggtcgttcgatgtcttacttcctgctttaatggacatgttcctgcaggacgcatcctcgatatcaattgtcatcatgcgctcacgagattgattacgccattcctacttcgaataatttcaagttctactcttttatttttgatgccaccattatcaattacgattttttgcaatgtttgaatttgtggaaggattcaaggttattgcgttacttcagcatgtacttgtagactcagctatatatctgtaactacacacagaaatatacgagattgacgaaggagcatatactgacttgagtgtaatgtacaatctctcatttagtgggagaggaatatatattttaggcgcctatgcagcctagtagtctgacagtatgaaaacgtttttcatgctaacattacgctagccttttggatgtcgtttatagcccggaggatgaagataattggcaaattacagaataagacataaaacgcctttccaggtttaaatgtgatcaataacattacttttgagaggtagactaggtcactgtttgtgatctgcaaaagttcaaggattacgcgttccaagttgtgggcactttagggtaattcttcgcgtggtagcccaggtcttcatagacggttgcatctcctaggattcaggtcagtctcaggatcaacagaaaattaacgtcgcaacataccttggagggaatcaacccgatgctcgtcttcgtctgccattttctccaattcctgaccaggctcttcctccttaggctgtttatcacccatagaagacgcagccttgccaaggtcattctgcgccgagccgatcatgaggaattgagaataaggatagtccaagaactctggctgcagaggcacccatcggagatctccgaatttctcaagtaccctaacgagaacaatgttaatatgagaatatttaaatcactccatggaagacagcttacgatggagggaattctggattctttggtaattgaccaactggtggaccaggaaacttgggactcttcgactggacgatccaacttccgcgttcttgcaggccaaagtcctcctggacatcacccaactcggccggaatggtcaggatataggcgagatgggatgcccgaggtgcggaggtgatcgcgtagacaccctccgcgtagggtctggctgcctcggtatgacgttcacctcgggtggaagtctggtaggttttaccagcgatgaaattatcgtggagagcttgcatggattgtccagccttctccacaaatcccatttctcgttctctggaagaggtcggaaacttctttttcgggagtatcatcaaccgacacgaggcgtctttttcgacggagtcttggccgttgtcgaattccgctccaagggcggttggacggaggacaaagaagctccgcgcgacatcgccgaaactttcaggctcgtctacatcgacgcgtgggcggaagaagaagtagatgaagcctttttcgagaatgttggagggtactaagttttccctctcctcggacttatgaagacctccctcaattccttgcggtttctccggatggctttcgactggtttcaccgtcgatgcttgtccttcgggtggttcttctgtcttgacaggtgcttcttctgtcttgacagatgcttcctctgtcttctgcactggacggtctaccgatgtacccggtacttcctcctttttcaattcgtctggctttatatcctccgttttctcctttttcggctgtggagcttcatcgcctgaagctctccgctttgttcccttggaagtcttgccggtcggctcggcggaagttgaaatggcctccttggccttctgagcagcgtggcgtgaggatgttcgtgtagccatgatgaatggtggattttgtggacgatggtgaagatcaaatctgatgaagcaatgggatttagcccctagggctgtaatgagatacagatgacgtcatgtcgtacgttgcaagtccgcatccgtgactttgctagaaatgaccgctcagaatgccattataatagaagtttcagtcgatatccatctcatcggccatgggccagttgttcatggggtcgttgccgttcaagtcgatcgatgctgtctccgaaccggagctttcattctcgttggcttcccggaaagcgccaaatgagtctatgtcttgagcatgccactttggaatttcgctaaacctttgccttttgggacgatgctcatgaacctcggtctgggtctcggccgacgcatgtccttgtgcgaaaaacgggtagcattgttgtgtagcgagagtgttgtgggctggctttctcttctgtcctctctttcgcgccgaaataattgtattgctattcgatccatcgggttcgtagcccatgtcattcaggtagtctgtcaagtcgcgctgccatcgttcgaaccgatccgggaggcatagtcgatctaccctgggtaggctagtttctaactcatcatcaggctcttcgatatcgtagggcttgatgactcgaattttgtcactgtcctcgagcggatccatgtcatgcgcaggcgttgagggtcctgagtcgtccatactctgctccctttccttgggctgatggtctgctgcagcatcagaagtaaggtcggcgaagtattcaatgggctccttaaacttgtcaggactcgtatcattcattggaaggtcttccattatctgatatcaagtcttgaacccaaacggcgttgacatggcaatccgaggtagacggtcaagttgcaaaaaccataactgagctcccaaggcaggaatgatggagtatgtgactggagaaatgtatgctattaaaaaataaagtacaatgaagagatcaggaaaatcgcacgagaatggaacgcgcaagaaagccatggtcgctataacatcatggccttccagatgcttctaacgtgggggtgataaataaccgcatatatgtccactcgacgttgaactttggatgccggttcgaaaaaagagaaaccataataggaatgcaatatactatgagaatatatcacgattccacttcgaccctgatctaaaaataatcaagtctctttggacagcgtaaagatcgagaccagctcccctgacctctcaccgcccggcagcatgattggccgatgtcattcgcttccacaatagagtccacgtttagttaactgctacactaacacaagcatcaagtgtttacctttcgctcttttctttctttcaggtggatgcggtggtcgcctctgccttatattgctctctagtgtgcggagcttgctactttacagtgcggctccggccaaatcttcaagatgcagtcctccccaaacatgctcaccaaggtacaccccctcgggcatcttaatgcgccatcgaacaatgggactcaattgaagatgctaatcattctctcaattgtttagtttgagtccaaatcctccagagctaaaggaatcgcgttccatcccaaacggtcagtcaatcccgcggagggacacctaacacctcaaagtgctcaatctgaccacaaaacagaccatggatcctcgtctcccttcactcatccacaatccaactgtgggactaccgtatgggaactcttatcgaccgattcgaagaacacgatggcccggttcgcggcgttgacttccacccaacccagcccctgtttgtatcgggaggtgacgactacaagatcaaggtctggaactaccagactcggaggtgcttgttcacattgaatggccacttggattatgtgcgaacagttttcttccaccccgagctgccctggattctgtctgcgtccgacgaccagaccatccgaatctggaactggcaaaatcggtcactcagtaagatgcattggagctacctgcaataacatcgactaacacgtctactctttttagtctgtacgatgaccggtcacaaccattatgttatgtgcgctcagttccaccccaccgaggatctcattgcctcggcctcgttggatcagtcagttcgcatttgggatatctccggcctgcggaagaagcactcggccccaacctcggtttccttcgaagaccaaatggcaagagccaacccaaaccaagccgatatgttcggaaacaccgatgcaatcgttaaatttgtgctggaaggtcatgaccgtggtgttaactgggtctcgttccaccccacactacccttgctcgtgtcagccggtgacgaccggttggttaagctctggcgcatgagtgatactaaggcatgggaagtcgatacttgccgcggccatttccagaatgcctccgctgctctgttccacccgcaccaagacctcatcctttccgtcggcgaagataagacgattcgcgcatgggatctcaacaagcgtacatccgttcagtcctttaagcgcgaccttgatcgattctgggttatcgctgcccaccccgagatgaacctgtttgccgcgggtcatgacactggtgttatggtcttcaagctcgagcgagagcgccctgcgtctgctatctaccagaaccagctgttttacatcacaaaggataagcacgtcaagtcatatgacttcagcaagaacgtcgagtcgccgccgttgctttcgctgcgcaagctgggttccccatgggtccccccacgtaccctctcttacaatcccgctgagcgtgctattttggttaccacgcccgccgataatggaacttatgaactgattcatctccccagagatggtactggggctgttgagcctacagatgttaaacgtggacaggctacttcggcagtcttcgtcgcccgcaaccgctttgccgtcttcagcccctcgacccaacaggtcgatatcaaggatcttagcaactccacaacgaagacaatcaagcccccagcgggcacaaccgacatctactttggtggtaccggatgtctgctcttcatcacccctacacatgttactcttttcgacattcaacaaaagaagcagcttgcagagcttgctgtcagcggggtgaagtatgtggtgtggtctaacgatggattgtactgcgctttgctcagtaaacacaacgtcactatcgtgaccaagacactcgagcaggttagcaccttgcacgagactattcgcatcaaaagtgctacctgggatgacgccggtgtcctgctttactccacccttaaccatgtgaagtactcccttctcaacggtgacaccggtatcatccgcactcttgaccagactgtatacctcgtgcgcgtcaagggacgcaatgtctatgctcttgaccgcaacgcccagccacgcatcttggagattgacccgactgagtatcgtttcaagcttgcccttgtgaagcgaaattacgacgaaatgcttcagattatcaagacctcgagtttggttggccagagcatcatctcttacctgcagaagaagggttacccggagattgctctacaattcgttcaagaccctcagactcgctttgaccttgcccttgaatgtggtaatctcgaggtcgccaatgaaatggcacgggaactcgaccgtcccaacttctggaccagacttggagctgaggcattggctcatggtaaccatcagatcgtcgaaatgacttaccaaaagcagcgtagcttcgacaagctctctttcctctacctctctaccggtgaccaggagaagctttctcgtatggccaagatcgccgaacaccgtggcgacttcacctctcgtttccaaaacgccatctaccgtggcgacgttgaggaccgcattcagatgttcaaggaagtggacttgtgtatgtacaaccctagtgccgattgtttctttcatactaattctcgcagaccctctcgcctatcttactgccaagtcaaatggtctggttgaagaggccgagtccattttggaggctgttggtctcaccgaagatcagattgtcctacctacactcgatcaacctctgaaggttcctcaccctattgtacccactttcaattccaattggcccgttaaggctgccggtcactcgtccttcgagaaggctcttcttggagaagttggtgttgctgatgaggaggctggcgctgttggattcgagattgaggaagaggagcaagaagctgatgtcgcccgggaaaccctcgatgatgacgaagaggcagtttccggatgggatatgggtgatgatgttattgttgaggaagaaatcgactttgtcaatgtggaaagcgccgaagctggcgccggcagttctgaggctgatttgtgggctcgtaactccccgctggctgctgatcacgtcgccgctggctcttttgacactgcgatgcagctcttgaaccgtcaagttggtgccgttcagttcgctcctctcaagcctcgcttcctcgaagtttacaaggcgaccaagacctacctcccggcgactgctggtctaccgcctttgatcaactacgtgcgccggaccatcgacgagactgactcccggaagatgcttcccatcattccccgagacctagagaccgttgccagtgttgacttgcaagagggttatgccgctatgcggtccaaccgattggaggagggcgtggcaacattcaaacgtattcttcacactgttctcgttaacaccgtgtcatccgaagccgatgtggatgaagcgaagaagatcattgccactgctcgggaatacattctcgctatgtcgatcgagctcgagcgccgtactctctctaccaactcccctgaggatctcaagcgcagccttgaattgtctgcctacttcacaattcccaagctcgaggtcgctcaccgacaactagcgttgatggctgccatgaagttggcctttgccaacaagaactacggctcagccttgagctttgccaaccggatgctggctaatggaggctccgctaaacttttggaacaggtaagaattcttaaagttcaattttccacttataatataccaatgctaattatgaaaaacaggccaagaagatcaaagctcaatgcgaacgcaatcctcaagaccagatcgacattgacttcgaccccttcgccgagttcgatatctgcgctgcgtcctttacccctatctatagcggctctcccagtgtctcagatcccttcaccggcgccaaataccatccccaatacaagggaagtgtcgaccggatatcagaggttacggagattggtgccccggccagcggcctacgcctgttcgtccccagtcagttttaattgccgcatgacgaagcataacggttttttgccttttttctcttcttgaaatgaagttacaaaatgggtacattttcatctgcacgaggagaagttgtgtttggcggcgctattcattttttttggctgggagaaagacaaaccttcctgcacacagtaccagtccccttgtctagatgtctttttgtatccaagattataattgcttagcgatctagtttgtatgcgaacatgttttgtccaaaagctctatctcctaggtattgcccaaaggtcttgtcttcgcctggtattcatgtattacccgcttagtagtgataaaagcaatccgtctttatttgccaaatatgcatatctaatgtacaagggagatctaaaccgaagagtagagagaagaccactccaacaaaaacaccataaacgtacagttcaattacaccgaccatctttccacccagttcgccacctctcttcccacaatcgacaatcaaactccttcttcccaagcttccgattgacctcattatgcgcctcgcacatccaccacccaaactccttccggctctccagtctcggctgattccgcccactcggatgcgccatccatctctggaaatcatccgcgcacacccagcaagggtacagctttgaaaagaacttcaagaacccgcccatattagcctggtgttccgtatctgccttttcggggtatgtggctgccatcgagtgcaatagtgtccatgtggagcgacctagctcttcgacgtctggcgggcagtctgagggagtttcgctcggggagggggttgcagcggcggccagagctggcgttgaggtcgtcattttgcctgtgttcgaattgggggatgaggtagcgttggagtttgcattcttgagttcggcttgcttggtcaatgctcgccatgaggcgacggaggtgcaggtgcggcagctgtaaggtgggtatattagcgccgatctcggttacggctagtcgtagatacgtacggctttccatctttgtccaggactacacccttgggcaatggcgcggctttcgggtcatcgtctccggttggcttggaggagcttgcggagttcgcgggggtttgctggttgaatatggaccctgtgcctttatattgactactgacttccggtggagccgatgccatttttcacctgtgattatttgaatccctcgacagattggtgatttggagtggtgaaagtgattcgaggttgatttctaatggattgcggagaaacaccggaggcgagaaagaggtaatagtgacggatatttggcgcaacagtcagtaaagagaacttggaataagctagcaagatccttagaatcaatgagctttgaatatgtagatccagaaactgagcccttgagcaagagtcgcaaatgacatacaagtctaatgtcatgccgatcaatctcgatccggctttgtcatccattcacacgcgctcgctcaacccagacgcgctcaagttcgcagtttgattgagataaataaatatctttcttctattactctgctctttggtccttatttcctcacatatcgtccgaggaactggacgattcatacgaactcgctcctacaccattaacctcctttcgatcgccatagagtgacataaacatgccgccgaagtatacgttgtccgactctgaagctgagggtgaggcacccagcactccctctcatcagattctcgagaagagccttcgtgaccaagtggctgcaatcttcaaggcgggaaatttggaggaattgaccgtgaagcgcgtgcgacttgctgcggaaaattcactaggtctcacagcggggtacttcaagactacaggtgactggaaagcgcggagtgaagatataatcaaggacgaggtggtgagtctttgtttgcatttgcagtgcttctttagcttgcgcagcttcagcggaaagacactgattgcgatgcttttacagggaatacaagatcaggcaatattagatccacaatcacaaacaccttctccctcgaaggccaagcctactgcccttgcgaaacgagcaaaatccgagaccgcaacaaagcccaggaagcgccagaagactaagacgccggtatccgatgaggaagatgagctaccggccccgccatccgagactcatgaggtcacaaagcccaagaatcgatcgaaggcacctataaaaaaggcacccgggaagaaggtctctgtacaaaaacacaaggacatgtcagacggttctgacttccctggtgatgagagtgatgatgtcgcaaagccgaataaacgatcgagcacgccagtgacgaagtcccctttgaagaagtcgccagcaaagaaggcctccgtaccaaaactcaccgaggatgtatcagatgttcccgacgatgctttgaatgccacaaaaatgaccaaagataccaaagatgattcggaaagcgagatgtcggtggtgcttgacgaagagccccagcctaaggccccacgcaagcgacaaagaagtgccggagaaactgcaaccaagacgaagaagaaagcgaccaaagccaccaaagccaaggaggaggatattagcccggaccaggctgaaatcaaacgactacaaggatggctcgtcaaatgcgggatccgtaagctttggggtaaagagctggcgccatatgacacccccaacgccaaaatcaagcatctcaaggggatgcttcaggatgctggaatgactggccggccatctcaagagaaggcaaaccagatccgcgaagaacgggagctgaaagcggatttagagcagatccagcaaggcgcaaaacaatggggtgctgtgagtgacgaggataatgatgaggaggcgaagcctcggcgtaggctgggtcggggacgacagtcgcttgcgttcttagagagtgagggcgaagagactgattgatggatagcatagggtccgtaatgaatgaatttgtcggactggttgagctgtgatgaaatcggatgatgcgttttatcactatgtatttcatacttcatagttcataatgtccaaaaatatagcaataggagtctccctcatcacccgactttcggtctactcatgcgctgcgcagtcaggctgaagatggcaacagaagagataaagaggacgagattgtagaactaaacttgttagcatgatcaaatcgactcgaggggtccattgacatactgcttttcgcgagtactcgttctcctccgcctcggttctagcctcgacaaagaggcgtcgcaagttagggaggttagcctgcagaagtgttagtcttggtggttggataatttgactgatgtagaataaataccatttacaccgtgatggtctggactaatggcaaaataaatgaaagagagagttgatggccatagagcgggagagtccagaagccaccatttgtggacaactttgatcgtccgaaacaccctttctctccttcgcccccattcctcctcgaaatctacccaccccggattgttcacgcacctctctgtgtttgcggacaaagtgacgaacaatctcgacagattccattccctgacctcgcgcgaccgtgaagctcccaatcccccgcagtcgccaaacgctactcgattcccaccccaatcccatatctctaggcggaggcacgacctagtcgttgctgaagcttatacatcctcgccatggcgatgaacaagatccgcggcgcctttgcggtgcctcggaaaggagagacatttgaattgcgagctggacttgtgtatgcggccccctccaccatgcgctggccaccttgccatggcgaatgatggatgatattaactattatgacagttcccagtatgcgtatgaacggtatgtatggcagtgaatcctcagtctgcccctggtagtatatgacggagacgtggtttggctgacaatgcaacaggaaggaatccattcaaaagacaatcatggccatgaccctaggaaaggatgtttcggccctgttcccggatgttctcaaaaacattgctacgtccgatcttgagcagaagaaattggtctacctctatctcatgtgggtaccaccgtacaactcaaggtggctacgtatgctgatcggtcgaatctcactttcaggaactacgccaaatcgcaccctgatctatgtattctcgccgtgaataccttcgtgcaagattcggaagaccccaacccactgattcgtgcgctagcaatccggacaatgggttgtattcgggtggagaagatggtggactacatggaagaaccgctgcgcaagaccctccgagacgagtcgccatatgttcgcaagaccgctgcgatctgtgttgccaagcttttcgatctgaacccgacaatggccatcgagaacgggttcttggagatgcttcaggagatgattggagaccccaaccccatggtcgtcgccaattcagtgaccgcacttcaggagattcagcacacagcacccgagacacatgctctacagattactggtaacactctgcggaagatgctgatggctttgaacgagtgtacggaatgggggcgcgtgactattctctcaactttggccgagtataagactaccgacgtgaaagagtcggagcacatttgtgaacgagtcgctcctcagttccaacatgttaatgccggtgtggttcttgcggcagtcaaggctgtgtttttacatatgaagaacgtcaaccctgacttgtcgaagacctacctaaagaagatggctccgccattgggtatgctcccacgctgctctcattgcacttattttttactaattctgtatagttacattggtttcatcagcccccgaggtgcaatacgttgcattaagaaatatcgaccttatcttgcaaaaggagcctgacattctcaacaaagagctccgtgttttcttctgcaaatacaatgacccccaatatgtcaagttccagaaacttgagattatggtacgcatagcgaacgatcgcaatgtggaccagctccttgctgaattgaaggaatatgcccttgaagtcgatatggactttgtccgtcgagctgtgagggcaatcggccaggttgccatcaagattgagagcgccagcgagcggtgcgtcaacacgttgttggatctcattaacaccaaggtgaactacgtcgttcaggaagcgattgttgtcatcaaggacatcttccggaaataccctggctacgaaggcatcatcccgactttatgccagtgcattgatgagttggatgagcccaatgctagagcagcactcatctggattgttggagagtacgccgagaagattagcaacgcgggtgatatcttgagtggctttgtagatggtttcaacgaagaattctcttcggtttgtttttcctcctggtatatgctaccacctcgactaacctatctagacacaattgcaaatcctcacagctgtggtcaaactcttcctcaagcggcccgagaaggcacagggcctggtacagcgggtactccaggctgcgacatccgagaacgataatccagatgtccgtgaccgagcgtatatctactggcgtcttctgtccaacaccagcgatccaaacgcgacaaagaacatcgtgctctcggacaagccccctatcgtcaccacgatacattcactgccaccggcactcctcgaccaactcctttccgaactgtctactctctcttccgtctatcacaagccccccgagcagtttgtcggccacggccgatttggcgctgacgccgtcatgcgcgctgctatcgagtacgtattcaattccctgtttttgtcgaatatgtcgctaaccacttctcagggaacaaatccaaaacgcgcgcgagaacccattggccgcggctgctgccgctgccgctggcggcaccgcaggccccgcacagtcgcaaaacaacgtcgagaacttgctggacatcgatttcgacggtggtgcccctgcctccgcacaaaccgagccttctggcggcctgtccggcctggagggtctggctggtacccccgtacgtgtagcgtcccctacagctggtaccccgacagcccaaacaagcaacaacctggatgatctcttgggcgtgtttggagactctggtgctgctcaaccctcatcgagcggtgccaacagcagtgatatcatgaacggattctctggtcttgatctctctggtaatgcgggtccttcttcaaacaaccagactaagaaatccaacgacgacatcttgtcactcttctagagcaatggcagtgatggtatagccaagtgtgtttagcccacctactggttgatgttatttcgggtgttttcgcaagcgagcatctgaattgaacgagatagattgttttcttttagttgtttaattttgcttgcatctttaccggacttcaaaaggcctgtacatttctgccccgaatatcaatttctttatgagtttttggcaaagctgccctcatagaatagcatttaccgaccatcccttgtagtggagagataggccagcgagatgcaaatagcctcccgctttttctcggccgatgcaagccacaactccaccgcgtgcgaaaaataggaagaaaacctcatccctgcgctttgaccccacaaatctctgacttctatgcatgaagtatatcgtccaatgtattacagcagattctgtctatgcaggagatatgtactatgcagatgctgctatgctagcccaacttatctcccctactccacctagatagacatcacacacgttatgggccactgggccagtatgggcccctcaaattgcgaattcacacaaaacggatccatcggataagaacgcggcttaccaattagtgattataccgaggtttttccagtgtcaaacgccgagttgggatcggggttcggacctgtcccgcgtccaagcgtataaatagggcaaagctcccggaaaagtggtgcacggtgaacacttccaatccgacaacatggcggaaacagactacaaattcgagggctggatgggtctcgaccctagtgccggcgagggcaagatggtctggcaagaattcgagccaaaacaatgggaggagaccgatgttgatatcaaagtgtctcactgcggcatctgtggctctgatttgcacactcttcggagtggctgggtatgttttatgttttccgtacagacgcagcgttgtgcaatatctgtataaaaattttaaaaaaaccagcaaactaacattccacagagacccactgcctacccctgctgcgtaggccacgaaattgtcggcacggccgtgcgcgtgggtagcaaggtatccgacatccagctcggcgaccgcgtcggtgtcggtgcgcagagcgagtcctgcctcggccgtctcggcgactgcgaggagtgcgcatcaggcctggagaactactgctgcaagaaagtcgtcggcacgtacaacagcgtccactacgacggcagcaagtcgtacggcgggtatgccaggtaccaccgtgtgcctggccacttcgccatcaagatccccgatgccatctcgtcggctgatgctgcgcccatgctgtgcggcggcgccaccctctacagcccgctgaagcacaacaactgtggtcctggcaagcgcgtgggcatcattggtgttggaggactgggtcactttggcttgctgtttgccaaggctatgggggctgatcaggttgttgctgtctcccggaagttggctaagaaggaggattcgctgaagatgggcgcggatctttatattgcgactgatgatgagccggactgggctacgactcatgctcggtctttggatttgattgtttcgactgtctcgtctactaagatgccgttcaacgactacctgggtctgctgaagactgctgggtcttttgtgcaggttggtcttcctgaggatggcggattgttcgctcctgttcggagtttgatgcgtcgcctcaagctgcagagttccctcgttggtagccccaacgagattcgggagatgtttgagcttgttgctgaaaagggaatccgcccgtgggtggaggtcatcccaatgaaggatgcgaataaggcgattgtggatatggatgacggaaaggcccgctacagatacgtgcttgccaacgagtaaaagcttataattagatagctagaatagacgagagatgtgcccacgaatgaagatcgaagtgttgaaagtatagccgtctagtgtatctgtaaagattggtctacgttagggccaatcaaaccacgcacgtgagcgccgttctcggaggcgctattccattttgggaactcagatttcccccgcggtggaatgaatcattccgcctcttcttctctacttcggcttcaaagattttctgtttgagtcaattgacggtcgcatcatgtctcctacactatcacaacagtatttaagtacccgcggtgctgagtacggggtgagttggaaaataacagttccaagtttcattgcaaacatgttactcaccaatctatctagagaacctttgaagatgttgttcttcaaggcctggcctcggacggtggtcttttcatccctgaggaaatccctgctcttccccaatcatgggagaccgaatggcgcgatctgagctttgaggatttggcgctcgaaatcatgtcgctctatatctctacggacgagattccccgagaagatctcaagagcatcatctataagtcctactcgactttccgacaccccgagcgcactccttccgtcctccttgaaaagaacctctacttgctcgagctattccacggcccgacctttgccttcaaggatgttgcgctaagtttcctcggaaacctgttcgagtatttccttgttcgaaagaatgctggaaagactggcaaggacagacaccaccttaccgttgtcggtgctactagcggcgacactggttcggctgctatctatggtctccgcggcaagaaagacgtctctgtcttcattctcttccccgatggcggccgagtctctcctattcaagagaagcaaatgacaactatcttggatcctaatgtccacaccctcaccgtggcgggctccttcgaccattgccaggatatcgtcaaggcgctcttcgccgatgcggaccttaactccacccacaacatcgccgcggtcaacagcattaacatggccagaatcctggcccagatcacctacttcttctactcctacttctccctcaccaaaaccgcctcgttcaccaaggaatccaacgtgcgcgtggtcgtcccgtccggcaacttcggcgacatccttgccggctggttcgctaagcagatgggtctccccatcgagaaactggtgattgccaccaacgagaatgacattctcgatcgcttcttccgcagcgacggccactacacaaagaaggccctcgacgcgaccaccgaccacggcgtgaaggaaacctacagtccagccatggacatcctcgtcagcagtaacttcgagcgcctcctctggttcctgtcatacaaaaccgccagcggcagcgaagccgagcgccgcaagatcgcctgcgaaagtgtcagtgggtggctgaacgagctcaagaccaacggcggcttccaagtccccagcgccgtcctcgaagccgccaaggtcgatttcgagagtgagcgcgtcagcaacgacgagaccatcgctatgatccgtgatatctacaagacttccttccctaagggtcttggtcccggctccgccaagagctccaagaccggtgggtacatccttgacccccacactgctgttggtgttgctgctacgcgccgctcgttggcgcgcaaccctgaggatatccatatctctctgtccactgcccacccggctaaatttgccagcgctgtggaccttgctctgcgttccgaggatggttacaacttcacggagatcttgccccaggagttcattggtttggagcagcgtgagagtcgggttaccgctgtcggcgagagtgctggatggcagggcgtcaaggagattgtcaaggcggagcttgaacaggagttgcaggggttgcgatagatccggacttggcaagagaataacgtgttatgaaattcaccgagttggtgagattcaacgggaggagcatgtgtatgctaaaaaaatcttgtgttgtagtatagacatgttggtaacgttttcactgttttcctcccttctattaaaatatatttccagtttttttttacacctataatctgagggcttgttgaatcgatactgaaaatgactgctcagattggacaagtatctgttatcctaagtattagtactattcatgctggataatgcctgaagagatgaagctattcagagatcacctgatctgtcaatatcggcgttattcatcaagtgggatgaccggtggaacttcattggtgactttcctcgccccaccggagctgtcattaccttactcttttcctttcaccttcacttttgtcacttcacttgtgaaatcgaaaggttggcaaaattctgcacaatgccacctcctgccaatattatcccctggttcaaatgtgactatccagattgcaacgctaaatatcggcgtaaagaacacctgaatcgacatcgtaatcatcatgatacggaaatcaatctcgcctgtccttattgtgagagcgtcctaaccaggaagtgagtaatttcttcgatcccgtgggaagactcaacttagagagtaatcagtgacctgttgcgacgccatgtccggacttaccatccgcaaagagaactgcctccgtctcgaaaatttagcgcatgtactgcatgtcatgcacggaaagtccgttgtgaaggtgtattgccatgcaatgcctgtcaacatcgcggcgtcctttgtgtgtctagtggggatgaaaccgtaagcgaacaacaattttcgatcgatgatctctgccctatgccgcctgtttccacgattgatgattccgtttctgacgctccccggtggattgctcatgactatattgatatttactttaatactttccatccaagatggccgtttcttcatcgaagtacatttgacttcgccaaggaaccttgtgtacttgttcaatccgttgtcgcaatcggactttgggtgaaagggactcaggaggcacgagacgcatcgatacgtctacataatcgactatgttctgcattttacgctcaaatggtgagaagaagaagcatgataaaagtaactgcatatagaattgtgtgttgatatcatctttttgctctaggaccaatggtgcatctccaactccagtccacgccaacacataaatacatcgtggcctataacatcatttcaaagtgtgctcttgaatatcattctttctcttttcattgcaagggagaatgctagtacagatctgagcatgcaatgccgattaccagacgacaaatacgacctcttggctgcgcttgttcaaagctgtcgaaggtcggggatcttctactaccctaacatgcttctgcaacacgatgccgatgcaccactcgcgcttgtatatgtgagcgttgaagagatcaagagatttggactagccctctataaggtgtgccgattgtccactcccgcttcctttgacttgagcggagaatgttccaatagtggcacaaccaatcttttgaccctggccgacttgtccttttgcatgccagacagtgatgagctgtggaatgctccattgggcggtgagtccgaggtgttaaacaagtctgattcatccgcagtcggacgggataatggagatgcgaaaaactggatatctcaagcatctgctcttctacatgacgcacgagttggctttgattggatatagcagaaactatcttacaagatgcggcttttaagccacagatcacaggccataagggcaacaatcgaacatattccctccggttgtccactcccacttcctttgatttgagcggagaattttccaatggtggcagaaacgatcttttgaccctggccgacttgtccttttgcatgcccgacagtgatgagctgtggaacgctccattgggcggggaatccgaggtgttaaacaagtccgattcatctgcggtcggacgggataatggagatgcgaaaaactggatatctcaagcatctgctcttctacacgacgcacgagttggctttgattggatataggagaaaccgtcatagaagatgcggctatttcgccacatatcaaaatgcagcctataaatgcatcgaacatattcccttactattttcttgacaaatacctttgtaatatttttttgtcaataaacgtacattggatctgcaccttcgccaccccgaggtccacagtcaccgatccttgaccgggtgggatggccgtaaagtgatcggcctccaggtgggatggccgacccgtttccccgcaaaaccatagggtttctaagcaaagagtaacgaagtacatataaaccggctcttctttttaatatcgagtgttcctactgcaacataatccaatcctccattttctaaaaacctctttatctacaatggcttctaccgctcaatccttccgcgagatcgtcggaattccccgctcctcagcttccccgaaggactcaaccctcatcattatcgacgcccagaacgaatacgccacaggcgctctcaagaccaaaaacgttacagaaacccgcaaatccatttccaaactactggaacgttaccgtcaagccggtaacggcaaaaacatcgtgcacgtcgtccacgaggtgcccgaaggcgcacccgtcttcacgccaaacactcccttggcacaagagtttgaggaactcacccctaaagcgggcgagaaagtggttaccaagaactttcctagctcgttcgcaaagaccgatctgcatgactatctgcaaggtctaggcgatgtaggaaagaaagtcgtgttggttggctatatggcgcatgtctgtgtctctaccactgcccgagcggctgctgagcttggatatgatgtgctggtcgtgagggatgcagttggtgacagggatatccctggtgtaaaggccgaggatctggtgtctgttgtgttgagtgagctggcggatggtttcgggactgtcgtctccgaggaagatattcgtgcataggcaactgatgcaatctgaaactgcgaggactattggatcgtattcaaaatcttcggactgtatgaaattctttcctatttccgggcctctaatatacgcacattgtgccgtgttctgataacagattcttagtaggggaatgtgatcatcacgtttcgggtaaaggaaatagtgtaccggatactacgccaaggatatgccaagacacgccaagcacggacgggtttgcggggcaatcaacggcttctaagatgttcatgtcaatggatgccggtccataccttaattgtctcaattccctattgcctttcggataatttccgaagcccgttaagtcccactaccgcggaagaactgacagtcttggcaatggaaatacaacttatagatagtcgacatttgttgaacacggaggaaaaggttgagctggaacctgcagtacgcaataaccttggagctgcatgtctcagttcaaggctaaaatttgaattttttttttttttgccgacatgtggcaaggggtgtgaccctggaagcactggcgatgccgtcaaatgagagaaggaagtaagcgtgtggacccgagatccaacctcccttggcgctgttcctcgttgcttctcgagttcctttggccttggctgtgctggtttgatgcttgatcaatagaaaaatctggagttcttatgacttggtccagaaaacagagcgagggaaagaaatgttggcttccacgttggctttgatatttctgagtccggtttctcccatagtcttccccgtatgtagctcacctatgttcttttctcctctttctcttcaggtcaatcattccagatagcccaatgcattcgtattgatctcccagcttcctctccgagactgttcattttaagagtattccctcatgataggtttcaaggtagcgaacgaggaggatgacggtctaactgtatatggtagcgagtggtattggtttatgtaagagacttaatagtaatagtgatagttaattaagaggttatatctaaggaagggaacaaatgtgtggattattagtaagaatctggaacgataggatgataattggtgaagatatcattagctaccgatataagtttcggctcctttcaagtctaatgcggtcttcggaagcttactttacttaatttgaagatggaatatgatagagtcctactatatgcagttgcaactctggtaaccgatatgccgacccctaaaacccatggccacttccgaaagtcgagccgaatcccgacttatttgcctgaattgctatggatttacgggtttacgggtttgcaggttctggcgcagtctagactctgcacttatatggacgttgaaggtgggaagtcatgacatcattctccttctacgtcgttagtctattagacttgatttctttatcaaaacggctaaaatctgtaccgaggcagaggcgcaagttccactaaaagattgcaattgttgcgttctagaattttgatatcatcttttgaggacgataatctctcggtcatgccgagtgataggttccctctaccgagttccaaccttaatatacatattggaagtttggttgagcctcacaaggctggccagtgtcgtgggcttcggattctttttaccgccaattcttatttcacctgatgggtatcaagtttttcaggtgtaaaaatcaggccatgatagatagtcggaaccggcaaagcctcggagaaatcggaaatagtagatgtcaagcatacatgttccatctataaatcagtatgttccacctcaagttcgcctgtgtgcaattgttgaatcgtctctttttacagaattctgactacacctccaatatgtgtttttgcgggatgtgctcttgcaactctggttcgaaatcagtcgggtcacaatccgttgagaacctggtgtacgaaattgtcaaaccgagctttccttgcggtgagaagctcagcaatagaagatgcttccgcagagcttcaaagatccttctcatcggtgaggtgcctggttcagagttataagcaatccataacccaacgcaacaggatcctcggggtgtgggaaatcgaccgtgatcaaaaagctacggatgcggttcggtcgagacatttcttctcgcgaaaaagaggaaacccgtcttgttgtttacgaaaacatatacagtgctcttgcatgtgctattcgtgaactacaagcccagggccgtctcctggacaatgcggatgatggggtaaggcttcaatcttcaggattcatggcaatacactgacactaccaggtcattcaaacattctggagcaatcaggagttcggaatgacccaaagtcgatggaactgcgaattgctcctatcaatgcgggaattgtgtcacagagcaattgttctggccactgctcttcgattcatcaatccggagagctatctcagaatgtacgcagctgggtcatcttgcaaccaatttctcctcctggattccatcatggaccacggctaatgtatgacaggtttctttcttcctacagccacgttctccagcccgagtggaatcctaccgaaacagacgtaatacaatgctacgtcccaaccaagtcgttgagtggtgcatggatcagcaaagacctcatagcattggaggccaatactaaacatacgacgcaaaaagaattgtccaagattatgccattagttgacggtattgtgtgcgtcgcggatatctcaactctcgactaccgatatatggtagaccccgggaaagtgagtctaactgtgccactccccttcctttctaccccagttgctcaccaaatcaagtctcaattcaatgaatcgctgggccttctcgaggaagtcctaggcagccggggtccccagcggaagccgatccagctcttactgaacaaaaccgatatactgcgcaggaagctaaagcacctgggagtatccttgtattccgagggcggactcttgcaatacttccctggttcggctgaatccgttgccaagtgcttcaaggagcacttgggatattgcgacgagtattatctacgggagatttgtgctctggacgcaacatggatgaaccacattttcaaggtgtggcgcgaaatgatgttcaaatcaaagcttcttgctgcaggtgttatgtgagaatcgggaatggctattttatctgtatatacatgttgcatatccttctcatctgtctttagccaagtatcttagacttagatatcagttagacctcccacttctcatgattaatgaacaaccaactatttgagacatttatgcttgacagtaaccgaatttcaagtgatttcataagtcttgagccattaaatagccaacccaagtaagtctatgtggcaatactctctccagccacagatgtcatgacgtggtccacttttcaagtaaatcatagttaagttttatcatcttgaaacctaccttacttcttattttttttcgtaaagtctgaatctctatcgttgtccatctctacctaccatccctcgatctgcactgaatcggcatgcattttcacaacagagactcctcctttcactcgacagataccgcccagaattcgccggattcggcgtcctatcacgaaaatgataaacctccatcatcgccatctgtcgagctcgttccaggtcaaaagggtcgactagctggtgggaagtacctccaaccttccacctcccaccatgaacacttcacaacccttgatttcgactttcctttaactggcaccaaagcgatagtccaaggtggtaagcaatatatcttgattgactacacctttggagacaaagagaatccattcaattggagcccttggaagaaggcattagtctcaggcctcctttgtttgatgacccttttcatcggcctagcgactactgcctacagctctggtatcacccgaatgtgtgcagatctcggcgtctccttggagctcgggcaaatgggtctgttcaccttcaatatgacctgcgccttggcaccattgttcctagcacctttttgcgaacttgctgggcgacgcattgtctacgcgggtgcatacgtggggttctcgattatgtttattggccttgcactaggcaagaatatcgcaactattctcgtatgccgagcgctgctaggtctattcggttgtgtagggactattcttgtcggaggtacctttggcgacatgtaccaccccgaggatcgagctatccctatggcctcgttctcgtatgtcgcaattctcggtaccgttgctgctccaatctacgccggcttcatcgacgagacaattggctggcgttggattgaaggaatccaaggtctagcgaatgtccctcttatgctcatcatcgtattcttctttcctgagactaggggcagcatgatgctttctaaaagggccaagattctacgttcaaagacgggtgatcaacgctatgtcgctctgaacgacctcgaagcacctaatttgaagcgtatgctatacaactcttccgtgaaagcagtaaaaatgcttattacggaacctgttgttttcttcttcggcctttggattagctttgcttggttcttgacctttctcttcttatcggtgatccctataacctatgaagaaaagaaaggctggagcgagggcgttgccggcctcccatacatcgcgctctgcatcggcacgaccctcggcttcatgatgcatttcctccaaattcacaaatacaacacagtatatgtacattggatcgggcctatgatcgggcttggtctgattacatttggaattttcttcatcttcgagtcgtgctatagcttcacgtcggattgctacggtgaaacttcctcttcggcgatcgctggacagggattcatgaggaatacgctcggcgccgtgtcgcctctatttgcttcccagttctttcataatgtgggcagccaatatgcaggcctgattctgtcgatcatagccgctttcttgactgcgatcccttatgtgttgtttgtttatggtccggcaattcgatcccgatctaagctggcgagtgtgcctcagcgtcggcctagctccggtctttgaagactatcagtgcggtggagaaggtccgatgccggatgtcaagaatatttgagtcacattttccatagggatctatattggactattggactattgacccactccgaggagaagagaatgtaacaaaaacagaacgatctacatgtgggcagagtgtataattagtgaataacggtatagttaagtggcagtaacgtggataatttaagatttacagaatctgaaacatttagataagaatttcagatatttgcattgtgggaattcgtattactttgactgagccatgtaaagctcactatgttgaacgcaaatgtatcagaattccaagcagaatacactgtacaggctgtcaggtgttagacttgtcattcttggactccaaaatccaggcctaccttcagggcctgatgcgtagatgcagccccaaaggtggcgtatgcggttgttgcctcgtcgaatgaataatctgcaacaaacaatcagatagaatgtcttcacggtcgaggtttaggacttacgatgcgtgactagcgagttgacgtccaacttgccctctttcacttgctgcagcaaggaggggattgagatcgcattgaccagcgacatgtggatacctaggacaaattagcacagaaaggaagcatcaatgaatacttgacgaacttatgtttcggtcccataatttttccaaatgtaaatccacctttttgccatggactcccatattcgcgatgcgcccgccaacagccaccagctcttggcacaattggaaggtagctgaaatgccaaccgcctcaatgacagagtcaaacccttcatttttggtcaagtccaggagctgtttctttgcgtctggagaaccagagttaatcgtataatgcgcacccaattcccgcgctttctctagacgcgtatcgtccaggtcaaccatgacaatcatctcggggttctttaggcgcgcagtaagaagagctgcaatccccaccggacccgcaccgacaatcaccaccgatcctgctgagtggacgtctgaactgagcacaccgcattcatagcctgtcggcaaggcatccgagaggcaaaccgcatcacgtgcgtctatagaggagtccaagcggtggagcgaccgagttgcgtgcggtacgcgtacgtactccgcctgggttccatcgagatggttgccaagaatccatcctccggattcgcagtgggcgggaatacctcgctgacagtaacggcacgacccacatgatgtcatgcaggagataaccactcggtcacctacttgcaatccttgcacggtggagcccaaggcctcaacaaccccaacgccttcgtgacccaagacaacgccagattctgcggtttggatgtcgcctttgatgatgtgcagatctgttccgcaaatggacgtatgcagcattcgcacaactgcgtcggtgggctcctgaatggttggcttgggtcgttctacgacttcaatcttgccattgttgcaaacaagacccttcatggtttcttggattaaagtgtaagaggtgtgggaaaattgtcggtgcgagttgaaggaaggaaaagaagtcgacggcgtgataggagaaatggaagggttgggtctttgggaatttatataccagctctggaggggtggagaacgtggtaatcgtcgaggatagaaagatatggcccttattgacgtcaggcagcctggcttggtggacctagaaaactaaaacaaggcattagtcgtgatagatatgcttatgcattgtgtgtgggactcgtacattgttcatgatgtggatgttggaaacagatcgcggtttcgggggcacctcggaaatatatcagccagatcagctgattgtagagagtttcgagtaatttcaatagcttcgggcggaggaaggtgattggttcagccgtaagaactagttaactagccggactcctgctcgtacgttattgagttatcctcgtacgtttgccgttagacggataaggaatgtcttggccggcctaacatatccgagaatatgcatctttgactttcgcatgattcaagcactgagtcatgacggagaacaataatactttctttgtgtattatcaattttgaatccatttggccggaaccggaagaaggtggcttcattggaatagttggcctctacagtatcaaatgagttatacagttgccgttaaactatatattgcgagtgacaatatcacaagttccaatcagccgtaaaataataccgcatatcatgatcataagacatactataagagaggcattaaagagtagcatcatgatatttgctaacctttccgttctcatcttccatctatacgcttgaaccaaattttcatgtcattcatagtgaactggacaaaagcgtcaagtgaataacagaatatcagtgcagctagagagaacgcctttgaaaattctataatcaacgaattcgaaaattcctacgattagggctaatgtgtggagtttcctcggaaatttcttaaaacaagataaatcgacttttcattcaatgcatatgcttctcaaacgaaatataatcttcaaaacatacaaagagcgaaataatccaagcaatagacactatattactattagtatacttaaaataagaccgataaagttcacaaaaatctcgaaatgaccaagcaaccgttcttccttaatccttcggccctgttaaaagcaaaaggagaaattccaagcggggcataggccaggcatccaaaaaaaaaaaaaataccgaaggtaccatgaggtctctgatccacaccacgaggaccagagaggtcaggaaccggaagggatccggatctcaataaagagatggatcgaccgtcgaggcttctcaactgatttacaggagagccatgagggcaacaacaccagcaaggaagccagcaacgggcttgacgctggaggcagcaccggtgaactcgccagcggagggagaggcgccgtgctgctcaggggtagagggcgcctccggggcggagggagtaggagagccggagggctgggcagcgggctgggacttagcagggacggcgggctgagtctcgccgggaacagcgggaacagcgggctgggtctgtccaggaacagcggggacagcgggctgggtctcgccgggaacagcagggacagcgggctgggtctcgccagggacaacggggacagcgggctgagtctcaccaggaacaacggggacagcaggctgggtctcgccggggacaacggggacagcgggctgagtctcaccgggaacaacgggggtagcgggctgggtctcgccgggaacagcagggacagcgggctgagtctcgccaggaacaacggggacagcaggctgggtctcgccggggacaacggggacagcgggctgagtctcaccgggaacaacgggggtagcgggctgggtctcgccgggaacagcagggacagcgggctgagtctcgccaggaacaacggggacagcaggctgggtctcgccggggacaacggggacagcgggctgagtctcaccgggaacaacgggggtagcgggctgggtctcgccgggaacagcagggacagcgggctgagtctcgccaggaacaacggggacagcaggctgggtctcgccggggacaacggggacagcgggctgagtctcaccgggaacaacgggggtagcgggctgggtctcgccgggaacagcagggacagcgggctgagtctcgccaggaacaacggggacagcaggctgggtctcgccggggacaacggggacagcgggctgagtctcaccgggaacaacgggggtagcgggctgggtctcgccgggaacagcagggacagcgggctgagtctcgccaggaacaacggggacagcaggctgggtctcgccggggacaacggggacagcgggctgagtctcaccgggaacaacgggggtagcgggctgggtctcgccgggaacagcagggacagcgggctgagtctcgccaggaacaacggggacagcaggctgggtctcgccggggacaacggggacagcgggctgagtctcaccgggaacaacgggggtagcgggctggggggacaatgggggtagcgggctgggtctcgccagggacaacagggacaacagggactgcgggctgggtctcgccggggacagcgggatgagtctcgccaggaacaacgggaacagcggggtgagtctctccagggacaacgggaaccacggtggtcggcacaacgggagcggtggggcctgcggtggggcctgcagtggcaggcacagtggagttgtagaaggtcaaaggcttctcatcgcacaaggtgcacacggtggtcttggtgatggtgatggtgcttgttccggtgacgggcacagtccaggtcttagagccagaggtgatggtagacgaggaagctggagatattgttaggatgtgtggttcaagtggtacgaatctggtagaggttataggacttactagggcaggtggtggtcacataagtgagggtcttggtggtgccaggcttcacagggaagtgaggcttggtggtctgctcgggcacagtagtggttccgttggcccaggtggtggtgctgtgctcgggcaccggggtggtcgaggtggtgcacggggtggtggtattgctgtacaccgggacggtggtgctatacaccggggtagtggtgttgtgcacagggatggtggtgctatgctcgggcaccggggtggtcgaggtagtgcacggggtagtggtgttgctgtgcaccgggatagtggtgctatacaccggggtggtggtgttatgcaccgggatggtggtactatgctcgggcaccggggtggtcgaggtagtgcacggggtggtggtgttgctgctgtgcaccgggatggtagtgctatgctcaggcaccggggtggtggtgctatgctcaggcactggggtggtcgaggtggtgcacggggtagtggtgctgtgcaccggggtagaggtggagtgactgtgcaccggggtggtggtggtagagtgcacccgggtggtggtgctatgctctggcaccgggctggtcgaggtggtgcacgggctggtccacgactcagacgactcagtggacttgctccaggactcgtaggtcgaagactgctcggccggcttggaccagctctcgccccagccctcagcctgggcaggggtagcaacagcagcagagctctgagcagcgggacggatgaagtcctcgccacgagcctgcatgataccggcaaaggccgggctggcaagagccagaagagcaacggaattgatcatttcgagagaacaaagtcttaacaaacaaacttggaaagataacgagtgaagagatgatgaagaaaatttcaatgatggacacagatgaacgatcttatatgccctgtttgagaagactggttccaagtcatgacggatatggtgtgccacggtcgtgtccaggtcagaaaggtagacctgaatcacaatgtcaccatatgaggccgaatgcaggtactaggacagctcaactccagatggcaaaggcacagatggaaggccattggacaaaatctcgcgcaatgatacattcatatggcaaactcagatgcaaacgtgacagactgtagtttcattggggtaagtggtgcaggaggtctccatcttcatccactagagtaacctaatgcggaagcatggaaagagcttggcaatctccatacgtctccacaaactgcgagagtagtgagcaaatccccggggggacagcatattgcttcattgcgatagagaaaatcgtttgataacggttcaagacacatgtgttttggattatgtggccagcaaaatgctcattctggatctccagggttagcagggcggtagccatgactcacctccggacagggggatagtagatcatattcaaacggaaccacaattgatatgacaaggttcctccgattggggctacagaccccacggagacgaatagcctcgtgggctaagctattggaccagaagcaggcaaaaccgcaagtacgaataggcgtgattccatccaagattggagctctggaatgtgggaatagcctccgattgagtatagggccgttccattggtaggtgccaccttgaaagaatgtacacgcgagctcgacgtatttccggagcacaacgatcctataggctcgcaagacatcttttctttgagttattaatcggatgtggcccatcgtagcatcggcggctgcaatcaatgacggggacatctcaatctagtatgttgtactgggttaggccaagcctccactgcgcgaagatggggctttcgccgcattaacattgtggctctcatcagagattgatatcggaaaagtcttcaaccaatccgagaatgtgatctgtgcagcctgcacggttgttattccatttttttttggaacagcagggaagtctagatgtcatccacggatcctggtgaatgagaggtacagcagtgaggtactacgcagatttggccgcaagcggtaagtggatgagcatagtacctcgatatcctgactgccctccatagtaaaagcaaggaacaacccgctttcggtcatatatgatatttccattttaggatagcacgtgacgtagggcttagggcagacgcgtgcacggggcatcgcgcgtcgcgcgtcgcgccttcctgtttgggtccaattaagccccggagaatcttgaaaagagcatctgctttgcccattcgcccacaatgcctcactcagtatcatccggctctgcgcagaatgatgatgagatgccggatgcccctccagtcgagacctcaactgagactcgcgtcagactcgaggatatgttcgacggcgatgatgatggtgatgacgatgaggagttcccggcttccgcagatgtgaagatggattctccgccaaaggaagagtgagtgctaagctcttgtacagtaatattggactcgactgctgacagaggctcgcaacaggcctccagcaccaacaccatcgggtgtggacccagatatcatgctcgccttttatcaacgacttttccccttccgatacctctttcaatggctgaatcatggaattgtacccacaaaagacttcggcaaccgcgaatttgcattgacactgcaaaatgacgcctatctccggtaccaatcatatccaactgctgacctgtaagacccatttcaactttgattgtccgatcccgtttgagctaacacgtatgcccaggttccggaaagacatacttaaaatgaacccttctcgtttcgaaatcggacctgtctatagcaccaacccacgcgatcggaaaacgctacgaggcggtcagatgaagccagtctcgaaggaattggtttttgatattgatttgactgattacgatgatattcgtacatgttgtgtcaaggcgaatatttgtgctaagtgctggtcatttgtgacaatgtcaatcaaggtcatcgacaccgcactacgggaggactttgggtttgaacacatcctctgggtttactctggtcgtcgtggtgctcacgcctgggtatgcgatccccgtgcgcgcaacctcacagatgaccgacgccgagccattgctggttatcttgaaataatccgcggggggtcacaaagcgggaaaaaggtcaacatcaaacggccactacacccccatattgtacgcagtcttgagttgctcaaacacgactttgcccggaccacactcggtgatcaagatacattcgaatctgccgagcaggcagaacgccttctgtccttgttgcctgacaagaccttaaacgactccttacggaggaaatgggaatcctctccagatcgtgccagcaccagcaaatgggccgatatcgattcacttgcaaagaccggtaagagcagcacgttaaacccggcgacgctcagggatgcgaagcaagatattgtcttggaatatacctacccacgcctggatgccgaggtcagcaaaaagatgattcatttgctcaagagtccctttgttattcaccccggcactggccgtatttgtgttcccatcgatcctcgcaatgcagaaaacttcgatcctctttccgtcccgacggtgatgaacctacttgctgagattgatgaatatgacgcgaaacactctgtcggcacagcggaggcagatatccccgacgctgaaggcagtgcgatgaatggctccgacattaagggtagccgtaaggtgcaggattatgaaaagaccagcctgaaaccttatatcgatttcttccgttccttcatcgcaggcctcatcaaggaagagcgtgctggtaagcgtgaacgagatgatagtggccctgttgttaaggctgatcctatggaattctaaccgcatcgtgttcatgtttgttccatttgcctagcgttgccataggattatgactttatgttttgttaattacctccaccgaattttactttggacttatatcaagggatcgcgcttgggagttggcatttattgtgcatggaaccgagttatttgttatcaatcagccttattctacctttattatattctcattcgaaactatcaattgaatagagatagggtgtgtcgatgaagcagttcatgaattagtttacgatgaagcaagatatgatatgaatgacactttttgctaggggttttcaaattgtagtatctacaattatgaaggcgctactgaacattcagcaggtcagatccatgggatggctgtatcaataccctggagataatcgctcagctgtggaacttatcaacttggaagatgttgaaattaagttagagtcaggagtacgagtatagcaatgtaataagtgaagtgattgtatattggaaatattggtacaaatagagtcgtacaagtaattgcactaaagctagccatgatatgttggcacacgggtggtatctccatatcaggcagacttctcattatcaaaaggcgtctctgacaggattaaaaagaaatgggccaaaggttgaatgtggtagtaaatttaagcaccaatgaagttcttgacggctaaagaaaggtattgttagcacgaatcacggaaattttatataggaagggaaacatactctccaaccagcgcaagtactccttctgctccttgacggagatgtagtcaggaaccatattagcgaactcggcgttaaggccacggtcctcgaggtagcggtcccagagaccctgaaggtcctcatcgaggttctcgaagggaggaccggcgtagaggctctggcgagcccagtccttctcagcagtctgggactgagcgagctcggcgttggcgaagtgggagacctcctcgatctggaacacgccgtcctggacaacggtctggatgagaagggcaccattgttgggtttctcgacggtgatggtaacacgggcagggaagctaggctcgggctgctcgatgtcctcggcggaggcctcggcatcctggccgcgggactggttctggaagtccatctcgtcggacaaagaggcgtcatcaaagtcctcctgttcgctgatgttctggatatcggcgacggtaaagctaacacggatgctaaacaatcatatgtattagcattcattgaagggaagaaagagtcgcgaggaattgtatgaatcgtacttctcagtgccgaacttcttggtcaggataacctcctgctcgccggcaacatccttcacctgccactcgccatccttaatagtctcctcgatggattctaattgctcctcgaattcgggaatctcggaagacttctcgtgtctcagctcatcctcgagcttggcgagaagctcgatgtcgactgtaaaaaagtaaaatccaatatcagcgtgaggccacatacgaagtccgccaccagacaagctcggatttcggcggactcttcagatatcatcaacgcatcttaccttcagacgaaggagccttgaagatgctggaggtcgagaaggcagcgtaggcgggcttagtggcctgattccatgattgccggagagcgggcttagggaatgctgggcgcagagccgaagtggcaatggagcgcgagaaagtgcgcgggatagagcgggtgacggtgcgaagagaaagcattgtgaatgtggatgggtctaaagttgatgaagatgaaagagcttgggaaaaagtaaatggagctaaagttattacgagtgccaagacccgcgcttctgttttggccgactttgcgcggccacgcaatttcattcgacgttaggcaaaaaggatatataatgttattggccttgattgaagagaacattgagtaatttggattgagtggaattcatatcgcgattcgctgcactctacgggatgaaagaccttgcgcatggaagaaacataaaattgattccgtaagtccatttttgtatgacactaggctcgctgacccttagtcctcattacaaaatacatccaccatctccccggcttctcgaggtccactgcgtcattgtgctcataagtggcgcaggtgaatactttaagtcggtcccccgggcatggagaaagtggatataggagtagatttatttaccccaacactctgcgcgttccaccctcgcacccaatatgtcaatacaccattcgaggaagatacagtgtgtgtgtgattcatttacgctgtcctctcgtcgaaacgatgtgcagcctaccactactatatgtatgtttctatgtatcgtgtaccacttcctaagcgaacttagagcctcgccgaggcctgctgtggcctatgccgttgttatgtttgcgctgcccttatggcgcgcgactttgaaaccgttaacagtaccctcgcagcttcgatcgcctcggcctacccggcgtttagaccgttttctggtctctatccccttaagcttatccgttattcgtcgattggctcgacagagacgggttcccgatcgcttccggccgtaggagtagactcagataaacgagggataactgataaatgtacgagaccattttattagaccattttattcgatattacgagatttgcccggggcgatacgaaccatcgtttctgagtaaagagaaatagtagcttatcttatttcaattctaggatgtataaacattgaacccgtctatttttgcggggtagggccgcttgataccgcgacgatcgtttatataatcctacgactataagagcacctacttcaactctacttttcagcaagtccaattctagagtcccgaggcataatttaggctacaaactgacagatggcgataataagccctcctcgttcaaatagctcttcttcaaaagaaaatcaatgcgtcaaaaacaagttcgtcgcaaatccaatttgatgaaaaaggcgcacgaatatagtaagttatgtgaagcagacgtctgtgtgcggattcgccttgggaaacaatatagactaaggatgtcgcataaagtctagcggtcactccgcaagggaagtggtcactttatatcgaaaatacagcgacttcgcaatactatcgagtatctacggccacaataaaagcgaacagtataatttatctcaagttcagtagttcattgatctaagatgcaccagcattttcttcctcaagatagcttcgtccttctgagcgtccttctcagcgtcttttgatcgttctcctaaacgtcgggtccttgaaacgtccttttaagcgtcttctctcacccctcttctctcctcacctcttccctccttaagtttctttctcctcggggcccttatcttcaccgctaaacaccaaaactgattgccaggttctattctggttgaccgcattcgtggtctctgggtctgcgtccgagcatcgcgaagacgcagcgcccgatcggttccagggcgcaggttatatcctccagctcggctgcagggagggtaaggagctcatttctaaaccactgggagttgacggtgcgctggataaagccaagggtctggagccgccgcctgaactccattactatagtccagtgcactgccgatctcgtgtgtggttgaactgccagcccagttcctcaaagtctgcccgtgatcaatctgcgagctctggggtccccttccacacctagtcccagaggcagtctacgtatcaggcgaggtcggcggttgagatctcaaagtgggtgccagacgggtccctccccgaaggcccttcaggaactcgtaggtcttggcgccattcttctcctggtggcactcgttccgaaaatcacagccctagagggcaccgcataccgatctcatccccttcacctccgggatgtatcctccgccgtgacttcgcactccagggcatcagtgttccactattgtcgcccagaagtaaatagtactcttgattgtccatcacggagtacctgaaagcgtacccactacaccacctggggccaacgagagccgccaaaatcacgcccatcgtgttcaccgggggccttgtctaatataataattaagtcattccggaaaataattcctatgagaaacgatgtcattttgatgttgtcgagagcttcaagctgaggcagcttattttctagaggaggtggtggcaaaccttcaagtatgctatgacgatttaactgaatgtctcaacgtacgaaatgtatacatcatgatggtgggggcctttacaatatgtacttttagtggactgcagcaaagaccaaagggttcgtttctctcctttccccatttatcagagccagttgtcaaccaaagttaccaaaagatgactatcccagatgaagtcgatatcattgtcgtcggcggtggcagtgctggttgtgtttccgctggccgtctcgccaatctcgatcataatctccaggttctgctgatcgaggcgggcgaagataacctgaacaacccacagtacgtaaatatcactggtgtattgactacatgctaatgcttaacagagtttttcgacctggtatctacccacagaatataaagcttgattctaagacagccaccttctaccattctcaaccatcgaaagctatagatggacggagagccattgtgccagctgcgcgggtccttggtggagggagttcaatcaactttatggtaatctgcacatgtcatttcttgtattgaggttcatctaagtgaatagctaggtgtatacaagagcctcggcctcggattatgacgactttgaagccaagggatggacaacgaaagagcttctgcctctcatgaagaagcctgaaacctaccagagacacagcacaaagcgagacgtccacggctttgacggtccaatcaaggcctcctttggaaactatacatatccaatcatgcaagagtttctccgtgcggctgaatctcaagacattccagtcactgatgacctgcaggacctacaagctgggtaagaactcgacatcctaagtagtaattgcattagtacgtttcggttatatattgacttgctgtggacctctagccacggtgccgagcaatggactaaatggatcaaccgtgatacaggtactgcagtctatctcttatctgatcttgcaacgtatcatactgattactttgtggattaggccgccgcagtgatgccgctcatgcgtatgttcacagcactcgagaagattacgaaaatctttacttgaagtgtaatacgaaggtggttagggttattattgaaaatggaacagcagtcggtattgtaaccgtcccagagaagcctctgaaagatgaaaaaatacaaaagatttacagagcgcgcaagcagattcttatctgcggtggtaccctcagctcacctctcatactccaacgatctggaattggtgaccctaaaaaacttcgtcaagcgggtgcgtccaacttctctcatccccagaaaccttgagatctgtcattctaagaagcttcatacaggcatcgaacctattgtggacctgccaggtgttggttgcaaatttcaagatcatcaccttctgttttctgcatacagagcgagacccgacactgagacattcgatgaattcgttcgcggaaataccgatgtccaaaatgcagctattaatgaatggatctctaaaggcactggtccgttgtcaacaaatgggattgaagcaggtgtgaagatccggccaactgaacaggaacttgaggagatgaagaattggcctacatctgattttctgagtggttgggagagttatttcaagaataaaccagataaaccggtcatgcactactccgtcattgctgggtaagaattcaaaccctctgtgagcttctctccagtttctaataaaaggtcacagctggttcggcgaccatttgcttatgcctcctgggaaattttttacgatgttccatttcttggtaactacaatgaagcacttgatcctatctagctcctaacaagaaatgcaggaatatcctttctcccgtggatggatccatgtgaaatccccggacccctatgaggctccggactttgatgcaggatttttgaatgatgaccgtgatatcgctcccttggtttggggctatatcaagtctcgtgagacagctcgccgtatggatgcatatgctggtgaagtgacctggatgcatcccagttttgcctcggactcgcctgctcgagcacatgatctggaccttgcaacaactaaagaatatggtggtcctgctcatatcacagctggtatccaacatggtaaggaaaccgcagtgattgctgtcgtccatcctttactaaaccatggttataggttcctggaccatacccgtcgatcctggaatgcagctaccagagagcgtgatcagctccagccggcaggcaattcgggagcccatcaaatacagccgggaggacattgagtgtattgagctctggggtgagtatacctacttccccatcttccttcatattctaagcacaattcccagcgagacgtcatgtagaaacaacatggcactcccttggtacgtgcagtatggctcctaaggaaggcaacttcaaagtcaagcatggaggagttgtcgatgagcggctgaatgtccatggtgtcaaaaacttaaagatctgtgatttgtcaatctgccccgataatgtgggtactaatccttacagcgtaagtcttccttgtcgctgtgttctatctcatttccttcagcgaaatctggtattaatgaatgttttttaaggttgctctcttaattggcgaaaaatgctctgtcctgaccgcggaggatcttggatattcgggctctgatcttgaaatgaaggtgcccacctacaatgccccaggtgaaactgttcatctccaccgagtttaacatgaggacaacggtccaaagagcgtattagatagttttgggattctagaatttcacttttcttgagactgtattatcttagtcttgagaacgggacttgggcgaggtcgtgtctttatgtccggatgatgtgagtagaggttacattacggtgtattggggcgccaacccgaaaacagcaaagctaaccagatgtagtaattcacaggtccctatattactctaagatagattctattcagtgtcagccatctcgaccttttactatatggtgtaacggaacacctgattggaccacttttaaaagaccaacctatctatctgtaccgtcttctagatcctagcccgatccagcggtaatcccttcttctccgccttatcctgaaccagcgcagctaaaggatcaagaccaagcttgtaagatttagccggtcatctaaaacctatagctgacgtatgagacgattatagcaattcttaaggatagtccgtcttcctggcccggcacagaaataataaagttgcgctagtcaatatctaccttgtgaagtagcagttttcgtctgttaagctactattagaaaccaggagtcaattctcttatcctagctttctggatctactgaggtactactattaggaggattaggcatttttagtctgggagtcagtagagcttttagtatgtcatatcctcgtatcgagatatactatcactaagggtaaggttgccgcaactattcggccggtaagtgctagtcttagcagccgatataagaaagtggtgcttataccgtaaccttataggtcctcgaaggaattcaatatctacgcggtcgcgggagagccctcgccgccttgagtaccaataccatattgctcacggagtccggtggagtcaggatcggtaagtagggaacctaagcgcacctggtgggccagataagtatagtttactcacggtgattaatgttatagtagaagtggagcacaggctacagctaccaaatcgatacagccgagatagacgcgctaactctgaagctattcgctttagctaaggttataaaaaggctgattataaagaatcctccacactaactatcacactcttataacttggttcgcgaaccttaactcgaaacacgcccgtccatatttggaattgtattcgatccatgatttccaagaatagactttgtattttacatgacgcggatgggattctgccagatgtattttactcgagaatgccatacaatcgcagaattgtatagtaacggctgtatgtagatggacgatacaacagcattgaattgaaatggtatattcgagaatattcggctgtacagaatctagaagaatcaatgtacccataatgcgccaacccagtctttttggacaccagacaaaaaaatatagaaaaaaggaatcgtgagatcatgacatgctcttcggtgggaaagtagacgcaagtttgtttccgtcttttgtgaaccgcatgaacttaatcgcgctgagacccgaccagtgtccattccagttcttcattgcggtcattgcatattgatcgcctatatcaggcatccacagtccggtctcgaactctcgcgcctcggtttgcacccgctgtttcaaggcctcttcgcgcttgctaggaggacgtcccttccggcgctctgactcgagctgtttgatttcctcggtatcacggtcaatgtacctggtttggattagtcttgggtttggtaatggaccatcggtggtgcgtacttggtgacaaactcggaaatctcttcggtcgaaagggcctcagtaagttcttggatagcctcatggatgtaatcaattcggtccactaatcgagtcagccgggtggccttcaattgaaatgggcagttgtctcacagtatggctgtcttgcacggttcacagtggcgttatggcgggacaatcgatcatcgcgagcgccagctttgcgaagtcggtgggcatcccgactgttctcatgaagcacattagtagaggtgcgcttcttagaaatctgcttgtgcacctttgtcaaggtaacaggcatggttgcgggctgatgacaagaattactccaaacactccgccgtggatttcgacgataattttcgtggatgcaacggcataattaagcggtgaaccccaaaatcaccgccttccccactcgaggaaagcgcgtctgcgcgtcgagataggcattccaggagttatctactccttcaatcctttaaccgggatttgttttggacctgctattgcattcaacattcattagtcttctgccggtgaaaatctcaacctatgttaccacttattgcttgaatacgaggacccgcctgtccctcgaacggtgtccacaatgggcatcaaaggtatgttaactttgtgactgtctaggggagatgaatggcgattctaacacagacaaataggactgcacgggcttctcaagtccattcagaaaccatgtcacatcaagaatttcaatgggcaaacgcttggagtcgatgcatatggatggctgcatcgagggactgttgcttgttcagtggatttggtcctggacaatccgacgagaaagtatgtctttcgatatcttatcccatgaactgttgactgacaattccatcttatgacagacacattgatttcgtcctcaaccgagtccgcatgcttcttttttttggagtgaaaccctacctcgtttttgatggcgacaatctgcccagcaaggcaggcactgaacaggatcgctacagacggcgccaggaaagcaaatgccttggactggaactacaacgaaaaggaagaatggcggaagcttaccaagagttccaaaaggccgtcgacgtgacaccctatatggctcgccagttaattgaggaactgaagcaaatgaatgtgcagtatgtggtggccccgtacgaggcagatgcccagttggtgtacttggagcaacagggtgacattcatggaatcatatccgaggactcggatttgcttgtttttggagccaagcgattaatttccaaattggatcaacacggcgaatgcattgagatcaaccgcgccgattttactgcgtgtcgcgaagtcagtttggttggcttcagtgatccagacttcagaaacatgtgcattttgagcggttgcgattacttggcaaatatccctaagctggggctgaagactgcctaccggattattcgcaagcatcggagcgttgagaaagccctgcgcatgctccagtttgagggtaatttccgggtcccagccgactaccttgccaacttcaaacaagccgagttgaccttcctttaccaacgggtcttctgccgcaaagctgaaaagctagtgactttgacaccacccgataaggataccaatttggctgcgcttccatatatcggcgccgatatggagccggaaattgccatcggagtttctcgtggcgatttggatccaactaccaaggaaccaattaccctgaagccactggccgcaggtagatggtcccttggtattaatcgccgccagacattgggtacttcctctgagttgaagccaaagaagtccatcaattcgttcttcactcccaagaggacaccgctggccgagctagaccctaacagcctaactccgtctccaagccagcagcgactcctagagcgaaatgcgagcaacagctggcaggccaatgcagcgcccttccgctccaactcggtcaggtccacgcctctcagggcgttttctgaccaaggtctcagccctatggttcggagtgtggaacgctcctcttttctggcccaaagtgcaagatcgtcggccttgcagtgcacaaagaggcagaggctgtgctctgaggccgagggggattctctgcctgcttgtccccctgctcgcagtcggttctttgctcaagccagccctagtcctcaagatctctcccggtctaaacggtcacgcaaatcagtgatcggtgtcttttctgatgaaattgcagaagacataatgtgcagcattcctgatcccagtactacccctgggcctgccgagtctacaactgagagaaaccttgagatatccgacaagcccagtgaagttgataccccttctaaacctacctccgacaaagtccttgtgacagagaacctcgatgtatctcagaatagtcctagggataacacaccgaactccccaggttttagtctggctcttgactatcacgttgaccggcaaaactcgaatttactctccaagtttacttttcaagctgggcaaaagcccgaaacaaccgcagctagctcgaccatgactaagattcctgcggctcagacttcccatagaccttcaacgccctcgacccccagaagcccagctgcgattgcacggagcaacgtcttccatcgacgcctgacgccgctccagcggatgggacagtccgctctcagtcgatctcacagcatcaatattcctactaaactccgggatgccgaagctgttgaacctcggactgaagcttcatctcctatcgtgcataaggtgtcctctctcgcaggaatccaaggcagcgaagatctcattgtcccagacagtgaggatgaagaggacgaggatgagcccagcacagggtactcaaccactcttgatctgaaacgctttgcttttgccgcgaattaggctgcatctctatctgattacggagcatagaacaggaacatcggattttggtatccggggtagcattggaccactgatttggtaggttccactttggcgcgtaacttgtgttaatacggagtactttggttgggtttattgtttgacatagcgttggttagagcatactcgaaaacctgaaacattgaaacgtgcccgatcgctagcttgtaggtactccgtgcatcgaagtgcatcatgtagacggcccaatattgaagaggctgggtgaatcgcgtggcttgtggatgtggggcgaaggttatcgagatctgcactagtccagatcgggactagagcggccctggctttcccgtgtccggcggcagaaatacccacacggaaggcggtctacgctggttaccggggaagcgggcgagtaaacaagggcgttggcccagcctcccatattttcctatacaactttgcctcatccccagcctccagagagattcagagaatcggtcaattagcctgacgttgagttttgtgccatttacgatcccttctttccatcccttccattctttctacacattctatctctcccatatacttcccacctgtactacacacaggcgtcaagtcatatcataatatctgacccatctggataatccactctaggtgcaaaccggattccacaataatatctaacatcctggatattgttctaagtattctcggcattggatacgtcaacgatctttatcctactctccgcattcttcatctacattccattccaacgatctcgatctcgattcaacgctcatcgcaaacacacgaaccaacaacaagtgtgccactggtgtacaattcagttcggtgatcgcattcaattcaggcaactccttctcggagacccgagaagcgagtcaacaacaaattgaaggagtctgaccccgacgtggtcttaattgcacacaatggctgctggctttgctcaaagatgggcccgtaagtgacgacatgtcgaaagagagcaaacaatggcattgttactaattctccatacagggttcattccaatgatcgggtaccaccacgtgttgatgattattatcgcagttgctattatcatattatgtgagtgcttgtccattgcgccctctactggaaagctgctaatataatgcagcacttctgttggccggctgctcttcatcatctccacagatgcccaccatcttccttatctccctatactacgaaaagtataaccctattagagatctctcacaagtcgacccaggggttgtcactgccctctccaatattgtcggcggtgcagagttggaagtccgagtgggatactttggtatctgtattcagcctgataagggttctttcatctgcaatgccaatgcgacggcgctggctgagattgtcacggtggatcaagatccactaaatctgatctgggttgcttcaacgttcaaagatgccgttgtgtttccgtatctcctgtgagtaactgtaattccttaacgtcagacaaaactaattctcgtgcaggattgttgctgtcattctcgcattcttttgtttcatccttctggcgacattccctggctggcacgaggaggttgacgaaactggatccgagcgcgaagtcaagccttttccctctcgccccgtctcccaggctgcgctagccctcattttcgtttcctcggtattcgttcttgtgtccgtattatggcagcacacggcatctgtcgctgccagtacgatagcccaagacatgggtaatggaagtgtgaaaagcggcgtcggctcttctgcaatggtgcttggctggtttggctttgtcctactggtgatagtcactgttggtttgctggtcatgatcttaagtataagtctgattcgcaaactgaccgatgaggaataatcaaaccatcctcaacgccgacgcaaaaaacacttgcgctctttgcttttctttttttttcgcgacttgcttacacctacttcttctttgcctacgacataccctacccttataacgggacgacacaaatggaaatgaataatacctacgagcacacgacactggctcgcaattcacggatggatgggaacggaacacacgacacttgggacattatgatttccccaaggggaatttgggacttgcacacttggattttacgaacatatttgaggacatggatcctcgcaggctttttattcttgggatctgactgagatatttttgtcgtttcatctcaagaccatatttggcagctctgccgatctgccgatctttcaggatagaatgaatggaatgcgattgagtcacattttgtacagatctcttttgcttgagtggaattctgttttatgttcagcacacagcgtttttttttttttttttgctcttttgatcggatcatgtataccacagcctcttgttcattccacgctgtgttcactttttcacttctcacacaggactgccaatgctagattagtccttacgacacaatgtcaaaaatgataccaaagtcaagccttcatttataactcaatctctccaataacctacaataagtgacattggatatcaaaagccccttcccattagtttatatctacaggagtgttgaatgttcttggctaccatttgctacaagactgtgtttggatatcatctataacatcaggaactatgaatatattcaatgtctgattatcatctgcttctagaaagttgtgcctcaaaaactcgtcaaagaggtgccagctgttaaagagcactcccagtaaccggacgctggtgacaagcaggctttcctcgtcaatgctacctgcaggacacaatgcaggcaaaacccatcaacaatgaagaaaggatataaagcggaatcagtatatatatagacgtcaatcattgcatgatccctcgccatcaatttgcgtgaactccgacaaatggcagctcagagctcatcactaaagcctatttccggatatactagcctgccgccaattctgacagctgcagcagcagaagaagcgtcctgcagaacgttaggcgaacaagtcgtcatgagtccctcatgaacctagttaaagccctaacaatcaacgttccgagtctggactcccgatgaacttcaccccacaggtactgtgtctttggcgtatatagcccactgcgtatggatttcattcgacaacggcgaaggtttcacggatattttatccttcaagataaccattcggtgggatgtttttggtcgtaaccaaatgaatctcaccaaatggctatctcgagggctgcaatatccgtgagacctgcctcattgtagagtgagagccgtaccctgtgggagccaaatggtttgcgggcggaagcatcgagaatccagactcggaacgttgattgtgagagttttcaggaggttgatcagcgactcataacgacttgtttgcctaccgttctgccggaccattcttcagctgctacagctgtcagattggcgataggctagtatacccggaaatagggtttagtgctgagctctgagctgccacttgccgcaccatctcacgctgctgatgcatgggatagagtcgatcgattctcttcatcagacactttcagccactagccaattagatttggaggtgatcgattaaatacctggatgagacagcaggtaagcaggtaatcggcctttggtagagccacgatgtgctcaggtgtaagatggaagtaccagagcattgccttggtcggtgcgggaatgatctcttggaagatttcaaggatctgcaggtgaacagttccaaattgatccgtaaattcacgacataaccatacctcctcatttttcctcattttccgggcatgaacttcacgaattcctgtcgcatctatcaattcggacagctccgactcgtcgtcaggattgacgatgggtacttggggaaaaagtaattcaaggctatgtaaacgaaagattgaggttgattccgttgtccttatcgtcgccgttatggagaaaatgatctgcggagcggacgatgagtcgtccgtgggatagatatatatgtatcaaaagacatcattctgcacacctgctcaagcttcgatgagaagggaaagtgggacgaagccatgggttgaattgagcaagctggctgagagggagagagagagggagaaaggaagatcaaatagagcaaaattcctatctgcccccaggcagcaaggctgcctcaacaaaccaaattgtcttaagatagaagttgcggtgagaaaagtggttgccaaccgtctcacatattctaatattgactgaccactgcttcacctagaaaagagaaagaaagaaagaccagccttcagaccacttccatcacatcccacaaggagatatagttcgtacagcgggaaatgacaagctgcacaaccagcaattcattgacgaactagcactcaggatcctggcactcctggatggccaggaactgaggcagtttcgggaatttctctagggtataggtaacattccgagaactcgctttgttcccacgggaccgaacgtagtaggtttcactaaagtgacggaggaatttattggccaattcctggttctgcttgttgtaggaagcattcatgcgagacatctgagtctgttgtaaaatggtgtagtcggtggcagctcccgcgtagtcctcgatgagaaggaagtgctcaatctcggtatgagcaggacgtggcgtcaacgatttcattggaacaaatttattccttcctacagtcactgcagcagttggcgcagtaatccagagtgtagtttcgaacgccggtgtagttggtcggttcccactaagagaggaagtaagtaggctcgagatcgcatcactgctgaccacgcctgtgaaactgtcgctcacgctattaataactaccgagaacatgcaatctggcaatggccttgaaggctcgattccaccgactggggtgtcttcccacgtcatgactgtcttctgcgccatggctttgaagattataataccgttctggcagacttccatgctaggtgctcgaagtactgataaccgaactctagcatcgaccatgcgacaggaaactagtttgaaccaattctgggatggccttgaagttggcatatggatgcaatagactacaagtgttcaatggaagccgactttggataatagaaagttacagataatgctgaagaccagcccgcgggtcagccttccgaaactgcggctttgaagactccaaatacaggttaaatgatcaatagtccatggagtaaccccctctgcctgcacctccgccaccattgtgtccattcttgctgtcgtgttgcccgtcgtgtccagtgctatgatcatctagcgacctatactggtagtattcacctcgaccacgacctcggccgcgacctcggttgttgttaccgcgcccgcgtccgacacctcggccacgtccacgatgagctcctcttcctcgcggactatcatcgtattggtgacgtccatcacctccgccgcgctgggaggagtgatagttgccgcggccataagatgggccatcagagccggtgttttgattgggccagacgacatttccgtcgtccggctggaagcgtctcttttgactcctgttcaagggttgctctccttgacgatactctccgctgtcctcgactcgtaggacaaccttctcgccgaccacagtctcaaaggtcatggctttgtcagccggaatggggtgccagttttggatcttccctgcatcgatgaggcgagcacctttgcgaacagccagtactacaattggcagtgggttctccgtgtgataaggctccgttgccgggataggtgccacgcgggctgcccatatcttgttgtccagatttccggttccggtaacctgccactttagtttcttacccaggcctccaaccttgcccaggattgaacgaggtgctgggcgtggggtgattaggatgctgttagccatgtacttcaggtcatttgattcaccaagccctggggggagcagtggagccagcaacttctgcgtcatgctgtttgaaacctctggagaaaccagataacctgtgtagaagacgacacgcttgatatacaaccgcccagagcggcttttggttacgttcaaagcagggttccgcagtgtgaggttgtgggaattgaccatgcgctgcacctcagaagcctcagttacggggtcaaggtatgtgctgccctcggttacctggatgacttcagcaaggataggcatccgtgcagtagagggtccattttggaggtctctgttcagacactcaaagaagtctcggaagcctttcacactagcagaaggttaatacattgatatgctcggattctccaactcggttgccacaggacttactgtctgacacggtcctcgtagacgcggatttccgcagcctgctcgtaagtgaaaacaagatcctcgagaaagttttgtttgaagttcattgtggtcgcaaaccgttgaccatgtggaccaacttcgggtttgagaccaattaggtcgaattcaagattttgactagcgaccatccgcttgatgatatctgagaagccggcctcacttcgaccggtcagcaacaccgtgagcgcatctttctgctccatgctattcctaaccaaactaagctttaaaaagtcagttcaaaacacccgcaacatgtaatatgtgatagaaggcacacaatttgctcattccaccagccttcccatttgcggggctcttctatctccatgccttttcctgtagcggcgagaatgttggggtcgtgccaccatcctccagttgcgaaactatcattggtttgaaggaagccgactgaggagccatgccataattgtgggtttggtagaggacttagaaatactgaaagtgcgaatgttagaatcgagtgtcagaccatcctaagctttgcatatgctcacaggtgttgtcgaaatcgtagacgtgaattgcgcgaatttgagaaacagctggaaaatatgaaagccgttagaattataacaggagagtggaccatagtgagatcgaacctggcagctccttgttcacaatagaccagcgtcgtagcgaggtgatcgtatgcgggcgattaatcccgcttccagtgctgtacgacatgttggcagcagagccaaatcgtgcaaggttctctgaaacgactgctttggcagatcgcattctatcaggttaaggggagatatgtcgttagcgcatagttgggagagaaagagggttgaagtcgcaaaaacgagcaggcgcggtgacggagctcccgagaaatcggttttgccgccgggaacgcgataaacgggacaaacgtgacttcgagaattcaacacctgcaacccacccctagcatgtcgcctgtatggatgatgtcgatttgcgacaggaaatcctccagcagactcttaaagaggtagctggtgaggagaaagaggcggcaaatccttgtgttatttgcctagacactatcaccgagccctgtgtggcacagccatgccaccatgtcaacttcgacttcctctgccttgttagttggatcgaacagcaacctaaatgcccgctatgtaagaaaccagtgggcaaaataccgctgactagacctgactgacaatccaacaggtaaagccgagttgacagcggtgcaatacgaactcaacgccacacaaggtccgaagctatacaaggtcccgtctccgagcgcaacattcccgacagttccagttactagtcgatcacgtcctggcaatcgctacggcccacggggagggcgacgtcctccacccccgccgcgaccacagtcagatgacccgctcgagcgccggcgcaatgtctatcgcaaccgaacatactccatgcgagtcgggtccaatcggttatctcagtatcgagaattgacaccagacctcttcgctcgtgacgaggagctcgtctcgcgtgctcggaaatggattcgccgcgaactacgagtcttctccttcctgaatccggaaccggagcatgaagagcggatatctcaccaagtttcgcgtcctggacctcagcggctggagaatcgcagggcgaataatgccgagttcctgctggaatatgtcatcgctatcttgcgcacggtcgatctcaaaggcagtgctggacaagcggaggagctgttgcgtgatttcatcggccgcgagaatgcatgtctgttcctccacgaattgcaggcgtggctgagaagtccatataattccttggaggactgggatcgtcatgttcagtactcgaatactccgcgaagtgtgtctgacggaggaaatagggatggtcgctcgggtcatagaccgactcctgtgaacaatcggagtagaccacagaggtcccgaagaccatacaggcccaggtctcaagatgcgattgatcgctccaggcggctgcagcaagctcaacagcgatataatccatattagatgtgcaactagatatgaaggtgttacatccatattgttaataattgtctagggaaataatcaatctctggttcccacgttaaaccgtttcagactttgtgcttttcatttagaaataatattttcctcccatgcaactctctctttgcgacttcgaagtcgatcaagtaaaatcaagtactgtacctaaatctgggggatgaacataatcccggattatgaactggtactattattcaattgcggtatcgattatttcagtgtttagtacgtagttctcagatctggacaggcagggtagagggctcgggggtattgatgcgctatgaatatctgagatatgagatgctatgtagttatgctgaatatgaatgttttaatgtagtcgtctctccatccacgaatgaagaacaactagggctgaccgattcttatttccggcggaaacgccctctaccccgagaggaacctcctctgttgatgcttattgatcgatagttcgcatgagcttcggctttgatcttccgaggacgaggtttctttgcttcgacagtctcagcaggcttcttcggaggtttccccatgggttcttgttcctgtggcttcacggaagaggatgaaacagcttccttgattctctccgagaaactcttcggtctggcaacaggctttggctgtcctgcgaattcagggtcatcgttcgagtcggaatcaaattcggcctcggtatcaagctcgggctccgacatggtatgaagggaagcggcctcatccgcccgttcaatgtcactcgggacatcatcccagccgtcactagccgcaggtggctgttgcgtctccggaactgctacaacatcatcttcatgttccgagtcctcattcgcaagagctgggtttggtttgggtttgggtttcggctgatgaataaccggcctcataatcactcgtcgcgtcgtccgtttctggcccttcttcttgtatttccggttcacatctggtccttgactatcctcaacctggatcttggcagcttcttccgcctctgcctcttcctccatctcgcgcatcacatcccagtcgtcatccatacgctcctcctccatatcccgcagtccttggactaaatgcgttagccccttgctggcaaatctttgcggcttacgcgagacaataggactgagtcctggaccatcatgctttgcactaagtggaggatatcgaccagagttggaccgacggaggaaagatggtgtcccagattgcgcttcctggggtgatatttcatgtgctgggtttagcagatttgtgctctgtgaatctgcattatcggtcgcttccaccatggcggcataacgcattgtcgtcggtgttgcgaatagatttgcaagatagaactgcttggtctcagatgcaggggttcgcgcaagcctgggcgtctcctgctgaggctcttcttccggggcctcggggattgtgcttacgggctttcgtttggagggtgtgcggaatgcggcagctaggttattcgttcgccttgtggcggaaggcgttccaccactcccgccagattcagatagcatgtcgaacaggcccaatgtctttccgtcacgctgaggcgtaggcccaattgcggcctttaatggcgatggtgctggtagtccttgccggtgtgtactgggactaaagagtctgcgaagagtcgacggcgagtcatacggatccagttgtgcagggtggtgcttggtacgattgttggatggagtcgcaaagagccctctggacgatttgcggggtgtgacttggagagatgtactatcctgaccggggggagatgcatgtttccgctttttcgagtggctttcatatccctcctgtcgactgttttcgcgccggcttagagatgcttcaagtgccttgagacgactgtattccttgtatttagcagctagtgcatcgaaacgtttttccaattagtgatttatttttttagacattatgcaacacgagattatcgacctaccgatatccgcgttttgtttgatatcatcgcgtccagctttgcggcccctattggctgacgagaaggctttctcccacgttttcaattcggcgcgaacattgacagcttgtgcaccgacctcagcactggaagtcagagcgttgtcggccattattgcattgtatgtggtatcagacaacctagaagaaaagcagtccgtaaatccatcgatgcgcgtcacgcgacgcgaactgattaacgacaagattggtaggcggtctaattctgcaattatcaatcatttcaatcaacaccacggagtaactactccttggaaaggatatgttcatcggcttaatttgcccaaggtaataaaatggtggctttctagggctatgtacttttacctaggaaaaggaatgccgaggatcatccatcataagtggacttactgccaatcgtacattgtagcgcattccctcccagctacccgtacgaccactcggggggaggtacgtagatagtcactactggcaatgatacagcgaattggaagtatttaagggctttgagatctccagcggccaatgtcttatctctaagtgcatatctaggctcatacgtgtggattgatacgtagttaggttttgtgttgttggtgtctttttctaactgaccaaaagcttgtcgtaacagcactttgctctagacgagacacagctctggcatagtagctttctaatatcgcatttcgcccggcgttgtttgcaaggatgatacggtccttgaactatacgctcacatttcgggggcatagttgtacggttgtcattgtggtacaacacgaaggaagtgaagaaaaagtgggagtcatcgtactaggaacctgggaaggccttggtcaagataaccgaagcggagacgcgaagaacggcacctagcgaaaattgacggatgttccaactgctccacatgcgaaggactaaagaagtgaagccatccctcctttcgtagtcgcaacagaaatattgggattatggagcaatgaccccgcggaaaactgttacctcatcttcatccccgacaagcgagccataccaaataccaaacgccgctccactgccgactccacaaactagggaccccatgcgaccccattctccgtctccatctgcatctccacgttaaagcaaggaagaagatccacagctccgccggcaccactgatctcttccatccaaacctgaggcatgtacgaagggcatatcatcgcgaggctcatagtatcgtgctcaaagattgtgagcatgtcactgcccgtatcatttagcatgctgatatggaaaaaggcgccattaccaccttccaatagcggaagacggatacgcgctttgagctaaagccaaaaccgcatttagaggatatttcaaaaaaaagggaaagggattagtgtccatgaatgtaagggccatgtccatagctggccttctgtacacattgctgcgaggtacggttcccacgctatgttatattagcgataacagaaaagataatagagattagatcaagcttacctcgcagaaatacggcttcttggccacaatacactcttcttggctggcaacacgcccgtcgaccacgaatgcctcgtcgttcaccgtgattgttccgttttgataaagctcaatcacggtggcgacattcttcgcttgacttgggcggtagagagggtcattcggatcaagcacgcgcgcaagagcggcagctctctgctcgttggtgggtggagggcgaggcaagcggggctgctcccagaattcagcgggaggttgtttctcggaattctgattggattcttcgggggttggcgacattttggattctgtaaaatggaagagaagaagcaaaggagaaggtcttactgagttgacgaaatggttagattcaaaccgcctaccaattgtaggtcgctcgttacgcatatgacggtttccgagtagcacggcgaggagcaaacatcgttcgataagagaatgaactgcctggcttcagtcggggagcagcttcgagattttaattataatcacacgtcattttcgcttctgttggtcgcagtccttctgctctattttctagacagctatatcgaatgtcgtcatcaatctgcgtccacggcacctctccccgagcagtgcctgttcgaggataattcactcggtactagattataagaagccattcgtaccgtagcgactccagaagaaggatattagagtttaacagagtgaaagttgccttgaagcatgctccggataaaaaaaacgatctgatttgatcactgtggttcctggtgcaatgcaagagacagaaaaagagcgaaaaggatttgatacataaaactgaccattcaactctcgcccaaagagccctgtcttcctcctatttccctcgctatgaatgcattaaagatcgccatttgaatcaaagttaaacctagcaccattatcttcccattaccaactcgtcaaccctttcacccgatcaaacccacccctcaactgcgactcaggatgaacaaccttcccctgaagaatagtgtacttaacaatgccctcgcaatgctcaggccgcacacgcgcaagccaaatcatctgctggtccttcttgcgatagatcaaaacattcgcagagaacttgtgcccgccgacatgcgatacgaagaagatgcccaccccgccgacccgggagtcatccggatcccggtcgagtcccagcggacggagttgtcgctccagctcgcgcttgatgagtggcgctgtgataccacagcgcgcatctcggcgtccgtgcgagcacagtaataccacgtagtcgagttcacaggctcgagcgttcattccattcgcgggagagccattttgctggtcgctggggtgatcgatgtatctggctatcagatctgggacgtccttttgcgtgacggagtcgacgtatgtgaatgacgggaggattagtactgtggtggcttgggtgggactttcgtctgtagttggctgttctggaggggtgagatttgatgctgacaccttgatacgctggatcgggtgttagtggtggtaggctaaattttgattataaagcttacaccgtggtctgattttgccccgtcgaatgcttccatcaagcttcctgtcgtgttttcgacattcttctccttccagtcggattgccccgttgcgacgagaacatgggtctggaattctttgatatcgccataaagaggccttgaagtttcgactttgactttggacgggaacttcactgtgcagtcggcgcagtcatttaaacattcggggccgtccgttttgggatccactttaggaaagaggtagtcgttggtgcccgcgcggcccaaggaaagcaaggaacgcaacatggttggaggtctgataacgctgtgaaggcaaagttgaaaattgaaagtcaaggctatgagacgttttttgaagttcagggttgcctccagggctggaaatgtggagatagatatagagctcagtatctccgagagactatactccgtactccgagccgggacaaaaaacccgaaccccgagctaatagggttatctccagacttgggtctctggtgttaagtggagatcattatacgagacccttttttatctcggggatggctttttagtttagactgacggccacttaagagtccatgtatttgatctttatctggcatgtgaaaggaaccttgggagctcgcatcctgctaacttcagggcacttcattgatcccaatgaggtgtacagcccaatcttatcagatcactcaacatcaacctcaagtttagctacgttgaagaatgacacatactgctgtctgtgatatctatgagcattgatacttgtgcttcttgtatcgcatcgaaaatctcattaaagcaaggtgtaatagaacaactagctcccgatgggggcagcactggtgtaacgggcttgacgtcggcgtcggggtgtgttcaggccaggcccatagtcatcagatggaacaatagctgtgcatggagtactatgcaattactcgtacgagcaaggcgagaaaaccaagggaatcaagttccatgtacgcatacaacatataggggcagtgttgacatggatcgtggtggtgattatggctgttctcgtgattcaaaactagaccaacatcgggaatatcgcgtgtcgttggtgcccagagattgccaagggatgcagttgcccatccgcaatgcttgaatgctttccgataggccttcggggattttcagtcccgaaatgtcatggaaaggaagatacccatgtccattccatgcaagccaagtaaaccccttagtggggtctggattgttcacggaaccatcgggactggaatatgtgggccggggaaagtaaacccgatagacaacatgagggaaattgtgaaagaataagaaagaagaggaattgcttattctttcatcattcgagtgatgtataaagaaaagaagatgaagacaaacaaaacaaaaaaaaaagaaattgccacgcgacgtcggtcagactttccagattgggcggttccacgggcgcagagcgggaccacgtaagcgggagctggagcctattcccagaacttctcaaacatctcggacgtaaggtctttcctaagtataacccgagcctccaaggttatcttcaacaccgagtgcatggatgttcaagggaatgcccagcccgaacgcgtgcggaagcgtcgccgccgcacaatggcgtgcacgcagtgtcgcacgcgcaagttgcgatgcgatcgcgagtatcccacttgcagtcgctgtctaaaaagcagaacaccgaacaaatgcacatatgaagatggctttttatggcagcagcccaccaccgtcccgactaatgcatttgcctccgaccgagggtctgcggtacctatgcctagagatacaccagtcgacacaccccgggattcggggataccgatggtgtcaaaccggccggaacctttcccaattagtgaaccgttcccaactagtgaaccacctcgtctggcaagggctggcggtccaatgcatcacgagtaccatggtcttaccgggcatgcgcttgcgccgccctatcgaagtcgaccacacgacagagagcgaaaggactgctttttggaaactgttctcggtgtgcctaaggctgctgttaatcaggaaccttacctgaatacgggtcttttacagcgtcccaagcgcccagcgccggcgacggagcatgatatgcaaacaccgtcgcaggtcgacgatccgcacattgacgaagaagaggacccattgtcacctacggaccagctcgacctctctcctcgaatgatgatgagggggcgtgagaccaaaacgcggtttagcggatcgggtatctttgccagtctagttgcacaggtctgctctcaccatttagattctaattaccaaaatacggaggctgactattattagtttccggatataaagccatttgcagatgagatcaggctttctaccccaatcttcacgcaacttcagtcagacctaagaagggttaaacgcgggctattgaaacatatggtgctcaacaggcccttccccgatcctacgacggcttcgctgattaacatgctgccctcgcctggtgtggtcgatgagcttgtcgggttgtatatcacttatatcgagtctactcaccgcattcttcatgttccatccttcctacgagagcttgaccaattttgggccatgttagacagcccggcatcaatatctgctgcctttacagttcaggtactgttggtccttgcctgtgcctggaaccttgcagattttgctagtctgcaatcaaaaagtgcgggcgaactcaagtgccagtgtgcagtggagtggacgttgcacgcaggacaatggatcgagaatcttcacacaaagcgcccggagatcacatcaatgcgactatcgattctgttgattttggcgcgcaacgcccacgggatgaaacgcagccaggcttggctcacaactagtacattggtcaagcaagcaatgatggcgggataccatcgcgatccaagccgatacacacgtatctctgcattcaacaaagagatgcggcggcgaatatggacaaccattgtagaactggacctgcaaattgctcttgaccgggggatgccaccgtcagtacaaagcttcgactacgatacggctccagggctgaacatttacgacgacgagatccatgaggacagtactgaagttcccggaagccggccattgaatgaaatcaccgactcctcgttccagtctgttctgagtcgctcactacctgtccgcctccaagcatgttccctcatgcactccccacgaattaactgtcgatatgaggatattcagcgtctggacggtgagctcaaccgccatctttctcgaattcctgcgtgggttgcagcagaccccagcgacatcattacacaaaacaagatcatactatggaaaggcttgattgagaccaaactttgccagtctctactgtctgtccacactccttttgccatcgaagcactacaagaaacactctttgctccctccgcgcgtactcgcatggatgccgcaaccagaatactgtcaacccagcgccggctacacgacatttcacgaacgctgtcgctatgtatgcttggtgaatggactatccaagcctacatttccatctgccaagtgctacacacaaccgaattcgatgcctgtaagttttttctattataataattgactattagaacccaacctgataatttgcagcccaaccctcatccatctcctctgccttcattctccacaatatacccggtatccccgaatcgctcctatcactcgttgaaacagccctgatcgccttggaagagcgctcccttttggtgaccaagggagccaaagactattatttcctctcgacgatcgtcggactagtcaaagcccgactttggcccgcacaggcaactatgtacaagcagcaggttgtcgagcgggtcctgtcatttgcgcagatcctcttctctcggcatatgaactgcgaccacctcggcgataaggggatgggcaatttcaaggacaaccaggtggctgcattcatggcggctccaacaatggtgcccgtcatgcaggccgaatttgatcccaatgggatgcacccgccactgcaatctggcggcatggtgagttccattctatccttggttctcgtcttcttttgtgctaactgggaatttctagccatctggcgatttcgatcctttcttggacatcttcgattgggaggatctgacaagtatgacatttccctgttgaatggaacagttcggccaagctttgcgtttttctgcggactgcacgatacacacttccactttctgcatttgctgtactcctaaaatttgtacaatagttgaacttgctcaggatacccatagtaaataccaagaaatatagttatgacaatgcggtcattcagatatcattgcgcaatcatgaatattgtgactcgatcgggtccaccatgagatcatgatcgaaggcatcaggattgacagcatgcagggggtgcagatcggacaagggaaagatcaatgccatgcttagcacggattcttatttgcacccttactgacaagtgccgagccttatatgtgactatttttctctagctttgacggttttgcgttgctttgccttgtaaagtgaagccttgtttgttactgatcgtcatgctacgtagctattgtggggatgatattcaataatcgactttgcagatcggggtccaaggcctacgaacaagctttgcagatcataccgcagtgccttttcaaggacaatacaaaacagcagaaatataagcaataggatgaactaaaaatgtaatctgatactgattcattctaacgaaagccaatcagaggaccctgtacctgatacttgcgggtctggtacctggcagtacctcagctcaaggcatagaatggctctggatcaggtacccccaggtaccattccaaatatagcggcgtctatgtaaaccccctaaaacacttggctttggcactaacttgaggctcgagggctgtgcttttttggatttcgcttttttccttgcgttgcatgtttatacggagtaccatgtgtatctctccgctttactccacccgttctcttccccttttccctgcattgactggacattaatcagagagtcatgggtatcacgatctaataaccccaattccccggccagccaggccaatctctttcataaaatccctgcatccacaacggggatataatccaatgtacataatcccgacgatgcatcacctcccactactcttatcaataatcatcgcggtcgcagctccactagcaggggccatcccagcccaagccgggacacacagtgcgacacaagtataccaaacaaccgacaaatacccactcgcaaacccaggcaacatccccgcccacgacccaaacatcatcctacacgatgagcactactacctcttcaaaggcgggatcaacatcccaattttcaaatccgccaatatatccgggccatgggaaaagctcggcacagtcctagccggcgacagcataatccgcaaaggcaaccgggcacgaccctgggcgccaacaacaattgaaagaaacggcacattctactgctactacacgctgagcgcgcgagggtcccgcaacagtgcgattggcgtcgcgacgacaactgccctcgacggcagtccctggaccgaccatggcgtcgtcattaacacgggcacgggcgctgggtcaggggtgtggccgtacacgatcacgaatgctatcgatgcgtctatgattgttgaccaggactccggccaggcgtatctcaactacggaagcttctggcatgatatatggcaggtcccgctggcggatgatctgctttctgtgaaagatgctgataagccggatgcggtgcagttgacatttctcccgcgtgttaagcctaagcctgaggaggggtcgtggatgagttttcggaatgggttctattatgtttggtttagtcatgggaagtgctgtaacttccagagtggtttccctgcgcgtgggaaggagtatagtattcgggttgggaggtcgaagagtgtgcgtgggcctttcgaggataaggatgggaggtctttgctcgatgggggtggcacggtggtttatggttctaatcatggggttgtgtatgcgcctggtggcttgggaatcttggctgggaataatgacgtgtcggatattctctactatcattatttgaatacgtcgattggctttgagcatgcggtgagttgttcttgtctttgtcgtcgggttgggatttgaactgatatttctcgttctcccagcaagctcagctcggctggaactatctggactacgaggatgggtggccggtgcctaccgaaggccaagatgctaccacggccaatgtcgccttcggttatggacctcctagctggggttacctagcaagtgttttgggtaagaggataatctcctattttatgtgtgttgtatgctgatactgagtttaggtgtatggctgtgcatggggccatagtagtggtcatgtcttgtttcttaaattccctcacgttcctttcttcgcaattttcagcgattgttctatatagcgtttttattccgacattatgcctatgaatcgatctagcgagcatttcattcaatatatgtcattggaatatcaagccatggcgctaaacccaatccatgccctaacctaatcttataccatcaaacttattcccaaccaccatccacactaacaatctgtccagtcgtatacgacgaagcatcactgagcagaaaaacaaccgtttgagcaacctcctcgcccgtcccaatgcgcgggatactagccggtggcatactaatcccaccctgaatctccttcgccatgtccagcaaaggcgtctgaatagaaccactaccacaaaacccaattagcaaaacccaccgaaaaacactcttccccaaatactcacggcgcaacagcattaaccctaatacccggccccacctccttagaaaccgactttgtcaacccagaaacagcatgcttcgtagtcgaataagcagcatgcaacgcaaaccccttaatcccctgaatactcgacgcattaacaatactgcccttccccccaggcgcagtcgccgtaatcgcccgcagctgcgcgcgcagacagtacatcaacccggtgacattaacccgcatcaacatatcccactcggcgtcgtcctggtcgacgaatttgctagtgccgtggttcttgccgatcgtgccggccatgttggctgcgccgtccagtcggccgaagtgcgagactgtgctggcgatccagtcttgtacggcgcttgcgttgctgatgtctaattccgttgtggtgattgtcgacgctgtggaggaactggagtcggtttcgattatttgtcgtgctgctgagaggatttgcgagcttaggtcggcgagggagaggagagctccttgcttgtgtagttggcgtgctacggctaggccgattccgctgagcccggttatggcgtatactttgcctttgacggagtccattgcggtggggtttttgatatgtttggtctgggaatgagagatttatgaacttggagagtagctgtgttacttgaatgattgcggggatcggagattctccgtggctaatatgtatgcatgtccgggtatattcgagctgcatacaacatagataataggctaaatgatgtgtttagaaagttgaatacccgtctgccccacgagatccattgtataaaatcgagaggatatacataccttacgaaagcaagcatagagtttgcataagatgatgataatagccttggcttattgatttgatcaatgcatcagctgtgtattctattgacctaagccatattaattgaatatatatccgcgacttgtcttgcgtatatcagctttccagatttacatcaatatctccacatctaaccaactccaaaatcacaaatgggtatctcaaaatgcaaaatcaacactccaatctcaaataaacatccccgacagaagcattgtcccaaccaccaaagccacccatcccaccggccgcctcacagccccagaattcttctccgttttggtcccatatacaaccccatgggcattcaagcagtacataactttcttcgcctcggccgaagaaggcacatcacagatcgccgtacaaggatcgggatcctcatatatccacaccccattcgggcagcaggactgcagaacagctttcatatccctgtccggggctttcgtctggtacagcggcacctgattataatattcgatattggcggggatggcgggcaccgcgtcgcgcaagtcgtagcactcggccggctgtgtgaatcgtgtgacgttggagtcgctcattatggggggtgtcatggtgttttcccttgccgggtgatccggtgcgaatgctttcgcgacgcgacgcgaaacagtattttagctgttatttatggcggggatgtgcagtgctgttgatcgcggttcgtggagagagagggaggcgtggttcgacaatgcagagaggcgggatggtcgggggagtagagagaaaggacattcggggattgttcagagcatatggaactagtaatgtcctccaggcctctctttttttactcctgagcacgggggggcaaagcgccaagcccgcattcccggacgttggagatatttgcctgacaagtggagatgcgggcctgagtattcagcttgcagcgaactcctttttgggcatcaatctaggtaatgctgttagagtgagacaaaaaggggaagtgggaactgatatttcgatttctccttgctgggctatttacttggtgagctatattgcatgtctttctatatacggactagtacggaggacttctgctccttacggtcagatttacaaccgagcggtttcattggctcgcttccacattttcttcctacgctcatgtccttcgttgaaatcagaaagccatttctgatcgaacggaggtaggcgccgtcctgcaccaccacgaggttccccggctagatggcggaggctctcgaagtagggctcgaagtcggggttgatgactgtgaacgcggggccatcggtcttctctgcgatgcggtcggtttcccatttttcctgctcggcgatcgagggtagggttattttgccggctaaaaagcgtgcggcggcaacagcctgccattcgaagactttgaaggtcaacccagcaccaacctgggattattgttagcgtttgatccggggaaaatttatcgacttgatagacttacagcgcctacaaagacaagtgttggatcatgtctgtagaagacatgttggtagagatccggcacacgattgttccgcgtggcaacctgaggcaagaaaggcagagtccagctgaagccagttccaaaaatcaaatagtcgacatcagtctcaaaggtaccgtcttcgaaatgcacggtccgttcgccttggtcattactcgtaatgtgtgagataggcgggcgacgctggattttcgggtgctggaaggcgagatctccgaaataggcgttgtaacgaccacgaaccacagcaataactggtgtctgagcactatcaatcaggctgactgcagtatcagcagcagaaacagacgctccgacggtgatgactttctgcgatgtgtaagcaggtggtagaatgacatggcaggaactccatttacctttccccgatacttctcaggcccacgataatgcttcgtatgttgaacactgccaggatacctcgcagcaaactccttcaacccaggaatcacagggataaacggcactgcgtaatggcccgaagccaccacaactgcatcatactcctcagaccaccagtaatccgacgtgacaccgtccagcacttccgtcctgcggaatgtaagcacccatttcttgctgctgggatctttgatggcgcgttcaacagtagtattatactgaacaagatcttggtacccctttcggttaaacaagtcctcaatatacttccggatgaccgaatggtgccggaaaggcgtgtctgcgccatggcgctcgatcgaccactgggatcgaactgtaggaatctcctcttgcgagaacgacatggctcccgcgttaacattagtctccagcgtcgggtagacgggggagtccgtgaagcggtcctgggaaactacaggcgtccggcacgggaggtgctcggggattttgagaggcgcatccgctgttcgcgcagctagaccgtcaaagtcgaactgctgtgacggttcgtcatctctcgatacccttttatttattagcgggaatcgctgaagatagtagagtaacatagtgacataccagcatccgccggctttctcttgtctctcgaatacatggatgacatcgaatgctttctcttgtgctagtgcatcgactgtaatggcgccagctgggccggccccgatgatggctacgctcttgatctgcggcatggtgtgatatttatgtttggtgagagattgggcgtgtagccgctctttatcatccaatgccgtctcggccgagcacccgaaaaggcaatatctggggtgcaaatcgttcgactctatcacgccatttgactgtgttttagcgcaaagttggcattggcggccaatgagggctctggatatcgtatataggatagccgaggtcagacttacgatatgtaaatgagaaccgctttcatttaatacattaatgtcgaattgaacatgctgaatcactcacattacaagtttttcatctttgtccatcggcctggcatttcatccgttgatctgattggctgtcggcattgaagttttaaggtcacgtgaggacatcccgggattcttcaggaactttattctgattggctgggagtttacgccttggaatttaggccataaagtcatacttctgtgtttgtttttctagttcggacgttgaacgggcattatgatttgcttcaataacaagagataatgcaatttgtaaatgattatacaaggggatcgaagcccagggtgcaaaagccgctaaactaagtaaacacatcggtagcataccgctccttcgtccgcaaattatcaaagaacttctcagcagcctcatcctccccaagctcagcaccaggcggagtctctcccttggccttaagctcggcgtgcacagcacgacgcctctcgagatacatatccttgcaagcctggcggataccagcaccaaccccagtgctaccgcacacatagattctcgcgccttcttcaaacagcttcaccagctcttcacggtcctcgagcatgacatcctggacatgctgtcccttgcttccatcggcaggacgactgtacgcccagcggacatcgacagcgcccagcgcagcccactctgcaagttcagcagcgtggatatcgtccaggccctgggtgcggcagccgatgtacagcactgccttggcgggcttcacagcggcattctcatgcagctcatccgagtcaggcgagctgcgacggccgcggatcttctccgcgcggtccatgacgaatccgcggaacggtgcgagcccgctgccagcgcaggccatgatcatcggtgtttcgagatcaatcggcggcttgaagccggagtgcgaggggcggacggtgatgtgtgcgcgttcgccggcttggagctcggaaaggtagtttgatgcgacgcctaggtagaggttttcgttgctttctggggtggggttggcgagtgctggagcgctgaggacgctgaaggtaatcgagcattcggatgggtcgactagcggcgacgaggaaatggagtactgtcgcacgcgcatgggcggcagcattgcgaggaaatcgccgagggaaatcttgattgagggataacgggtgagaagatccagcgcgctgacgcgcttcttgacgatttcttcggtgaagcggctggggctggaggcgagatagcgcaattcggcctggagttctgcgtccgcaattgcggcatcggcgaggacattgagatcgcgcttcgaagcgggttgggatagctcgatgtaggtggataggagctcgaaggcggaaatgggcgtgtcgatggggatcgagggggaagctgttgagcctgagggcttttggattttaatcacggcatcccaggggaggtcgaagcggcggatcgcgcggcggacgattgagcttgggttgacaggtagcacagcgaggtaatcaccacactggtaggtcatgtccgttggcagcttgaacttgaccacgcgtttggctggggctccgggtggcgtaaggagctcgttttcaatgacgaagccctcttcgagctggagacccagtgtggatgcacgcaaacccgagctcacttcgacctgcaaggaagacttcgacttggctgcgttttcaggggtagctccaccgaatttagccatcacggccggccagaatgaggtctcgccccagccgtcgaaatcggtgaacatgtctgagtttgctgcgtcggcaagaccaatctcacaaagctggttagccccgttgtccttggcgatttggtcgatggccttgggaatacggtagaaggtggacgaccaatcatgatggccacagccgaacactgcgtagttgacaccttccaactcgctgcccttcagcccactgatccactggaagaagtgagccgcgttatccggaggctgtccttcataagaagctgagatgaagaccacaggctcgcccttggggatattctgcatggctgagtccaaagaacttgtctgcgcagcgtacccgtaggcagtggcatcatccgccaacctgcgagcgaacgcctcgcaggttcccgtgttgctgccatagaacacgtgcattggcttcagcttaccatccgcgtgtgcggcgaccttgggcttgcgatcccggctgccagcgccagtctctgggggcacaacagcagagccgctgagtttaacgctgagttgcgtggggtcaagtccatctctcagggttgccttcatgtggaagtccttgggcttgatggtaagtgtctgcttgatgcggagatcatagctggggttatccatctggaagttgaagttctgcagcaaaatcgcaaccacaaggagagcctcttgccatgcgaacggccgtccaatacagccgcgcatgccgtttccaaatggcttccacgcgttcttgggcagcttgtcgaagttctcatcgagcatccgctctggtctgaactcctcggcgtcggggccgtagaccttggggtcgcgatgcattttggtaagcataatggcgatgacctcatccttattgagcacatatttaccacctccaagtgtaacaggatcttcgtggttcttctcggggtgggcgtgtaaggcaatcattggggctgttggcttcagacgcagcgtctcgcgcatgacagcgttgatgtatggcagcttggacatgtcatcgacggtgatcttgcgtttaccaataacattgtcgacttcctcttgagcctttctgtatgcgctcgggttcttgagaagatagtagaacaggaatgacagcatgccagaggtggtctcgtggcctaagaaagtcagggctgaaatattgcgtccgttggaggattcacttaccagcgatgaggaacgtgatcatgttgtccacaatcgacgcatctgtcatacccttgccagtctgcgggtcccgacccaggataagcgcattgagaagatccttcttgtcaacggggttctccttccgcgcatcgaccaattcctgagataggttgcgcagatactcgatatcactccagtacttgttgttctccgaagtaggcagactgttgagcaaagcagggcgaagactgcgatgtccagaacctaagagcaaaccaaccattgcctcgacaaatgggtgcatttcatcatggtagaacgagttgaagcgagtgcccatggcgcaaagagcaatcgtatccagtgtcaagcgagtgaagtcatccgtaacctggataggaacggtagggccagcccgagcccatttcataaccagttgagttgcaatatcatacatctctgaaagcaagttagccaaactcgttcgtctgcctgcgtgccgcatagctctgacccgacagaaaagggatacccaccatcgaacatcccgcgaatcatcaacggaccaaaggcaggaacaagaatgcgatgggcaaccgcccagttctcttcgccgggatagtttgcggtgaagagaccgtcgttgacaccgttgcgaatctcatgcagaccagcggagaccattttgccgaaacgttcctcatcgcagacttcatctactagctcgtgggagctcacgaatactcgcggtttgccaaagatggttaatcgaaagatggggcctgaaagtgagaagcacaagaattagcccatgatgttcacactatacgtccctgaccgtgcagatctccataccatagttatcggccatctgctcgaagctgttcacaggcacctcggactcgatgtcgtagatgtttcccaagaatgggacacccctggggcccggaatcgggacctctttgactgaagccatggcgtataaagtccgccgttcaattggggagtttgatcaatttcaatagttggtgtcgtgtcacaatttggaatacgtaatgatgtaagggagcaatggcggggtacctggtcgaggtcgtaatccggtcagccgctgtacacttatgtcgaaatgacccttggagctgcagatgcaataggatgaagaattaaaccaagcttgggagattaaatcctgaactcaggaggaattgcaaagggttataaacgaaaaagtgtgacctcaccgactgtcaagcctcggttccttttttagtgtgctcataacagcgttcatcttgcatatgggatcgctgcacaaattacataacttcatttatgttgcaattcatttgtttcatccgcgtcgcaatgcccggatctatgacggggcatcggtcgaagcccaatcacgatcgccgtgtattaatcggccgtgccgagaactcgtccaccgcctgtcggatttgacacgaatcccgaagacacggcattgtataaaggcacatccgcacagccgaatccactatatccacatgcttagactgtttagagagtcgcctcgcgggaatatccctcttgggtcttatctaactgggtccggcccattatcgccccgactctggtgttgggcccacgtcttggctatataagataaaaatgtactccgtttgaatccgtcttgcttccagaatgtagatggtgcaaatactgggtactaataagatactagactgggctactttccactcaccaagatcaaggggtaagagaattgaaagaaagggtttgtatggcaatatatttacatgaatggagaagcatattgcaaagcaaaaggcggcctaaacaacgccaacgaagggaattgggattcaaggatcaaaaggggatatcaacagaatggagcggacgcgagacagaggcaagcgacagtaggaaaaaaacgacggtaagccggaaagccgggacgaaaagaaaagggacattattccggctccttcagcaaccacagatgcccaagattcatgtcatagcgacaatctgtgagaccggacatggcgccgaccgaaaggaagaagaatcacggaactattcattatacaggtccaaacgcaggttcgtggggtcactagtgcggctgacaagccggctagttgtggacctgctgataaccaccgttcaacttccactcgctctgcctccagtctttctggaagttctgcatctcatcgcggttaagaggaaccgggttgttgcctaatgcgttctcgagacggcccttgcggcgctggcgcaggcataagaacagcagcgctgcgataccaatggcaccggcggcggcggcgccaacgtagactccaatgtgagctccctcgccgagatcatcccatttttctgatagagacttggcctcgggcttgttcagttcggtcagtacggtggagtttccgctgttgcatctcattagtgatatcctgattggctctagattgggcacacttactccaccactttgatgctctcccatgaacctgtctggtccccgtaggtgtactccttgccagtgtggaaatccttcacacgcagcttgccaagggtcatagtgaaaggcgcggaatcccagtcgacaaggccaccagcccactcgatagtaccctgcgctgcgcttttctgaccagcaggccagagactgaattggacacggcagggtgtctgtgggtagtttttgccgtacagggtggacttctcggagtattcgagttcgcgaaccatctcgccatcaatccaccattgcaatttatccttcgcccagtaggtggtgtagttatggaactctgtgtccgcgttcggcacatagtgaaatccaccgcgatcgaaggtgctatcgttacccttgccaaagaagttggactgcacttcgctagtgttgtatcccacccattcccaatcaatctcatctagatcgtcggactccaagactacactgctgactagacctccgcccttggccatcttgacgtgagattcgacgacaccgaagaatatatagaaggtcgactgtaggagcgtggactctccttccttggagagagtgaaattggctccgtcgtcaccgtacacgtatgttccggtcgtcatagaccagaccttttcgtccaaggttgtgttgaagtcccatgtgtgttcggtgcccaaggcgggatccgcaggacatgtcttcttcgttgggtcacagtcagtcgatgtttgagcggtggcgtagctagccaaagctgccagaacggcaatgcgggagaggaacatggtgggttgatgtatatagaggattggtcagggttctgctgtgagactgtccaaaaaaaggaatggactcgagactactcgagattcgataaagagtggatgtgcaagtgcacggtaatgagtggaaggcagtctgccagcaagatcctaacagtgtgttgaaggaaggaacatcgagaaacggggggaaatcagccacgacagtccaatttaggcgtcgagtggactcgggacattatgggctagtggtgtcttgggccctgataatttttgtgcaccgttggagaggcgtaaggggaaggctgcagagactatggttgagtttactagctagccggtctaggctaggggttccgtttttgtgcatggcgctagccgtgttaggtcaagctccaggggccctgtgcatgacgtctaacctgtttgggctcgcccagtggtttctgataaaaccacttttaggcgggcgattctgattggctgctgaccatccaccgattggctgtaaaggaccccgataaccttggatcgaacaggcccatggattgccaggtacaatacggagtacgacaacatgtatactccggattctataacaggttgatacattcaacactgtgttgtagtgtgttattttccatttttagccgcagaaatcccttggctcaaacgcagaacaagactggctgtttagctcatgccttggccattcgaggggaaacttctgcaatgaagatcaaacgcccaattgataagaatcgccacggggtaagaccaggattggactacagatggatcatcatgcatgtgccccttgaaaacaacacttcaaaatcataacaacagcgtaacaacaacttatttccagagttcctccagttcctccgacctaccaaactagtattccagcaacctccgctcagggggtccaaaaacaaagccactaagaagccaagtccgccccgtcaatgagtggagatgtctaacagtttttctttttctttttttcttctcccctgtgggccctttcccctgtcttaccttcctacctgcaaacccgctcattatgtacaatgggataatgcactttcccgaacgatcgcctcccactcttattcgtcgaaacggtgagatcacggctgcggcgtttttcgttcgccgttggatggagtctgcttcgctggcgaagagttcccttaggggaaacttcgggagttctgatcgatcgaacgccactgctcggcggtgacaaacagccaagtagccaagtcctactgagccaggccaaggcataataatccctcactacggagtactcaggtacccgtcagcaagtcgtccgactggattacgtggacatccgccacatgtgaatgtgcattacaagggctgaaaaagattctcgccatgcactgggatatagatttggaaggctggcgtctacagcatagatcggattcccaattcaaaacaaagaagcatcacacgcacagaccaaatccttttcaagtatttctcgtcaagtcgtaaaaccgtgcaatcacatgtatgctgtcatgtctcataaccaacattgctccgtcaaacctgtccacccattccttcgagaaagcacccaaaaatagcaaacgccggtcccaatcgatatgttcgagaccaatggccaaatcaattcccccacaccagcaattccacatctctcatgtataatccgcaccttaattcacccctccgtcctataaaccctagccggccggcgcaaatcatcgcgatcgctatatcggcgtgaactgcgtacactagccggcttctcggcataatcgacataagtcgcagacgggcgacggcgatgtcgccgtccacgggtcttggtgctgctgcgaataaccggggcctggtagacgacctcggacgcatcattcttccacacgccgggaagtcggagtattcgccacagccacaggatcaggagggtccctgcgatcgagccgataacgatacccgcaatcccaccgccggtgattgtgcttgggcagttatcgtcgcttgactgccgggtctcgagcatggagtgtataggagcctagggaagcggagtcattagcttttatgaattccagactctgcgatccgtggttctttgttcggcccgcgcgggtgttactggggtgagccatggaagagagcttcagtaacggatcaccgaggtatgcgcttaccataactgcagcctgtggactatctatttagcaatgcttttgatctgatatcgtgggatttgaggttccagtccctggtggctggcaattgcatgcagtactccgtacagtgggtctcgatgcgatcttgactccagcacccgaaaaaaaaacgtgggtatgaatgagacgaaatcacccatgcagcagatgagaaagggaaaaagggaaacccagcgcaagagcctcaagtcttattcaacccagaatctcacatttcccctcttgactgcgcacccccaacctcctcttatcccgcttctgacgtcaagcggctgtcggtcttggcggctggaaagagcagcgatcttctctttcgcacagcacaaacttggaatttagttgcagtcggttcttgtttgatgccatgattggctgctgaccttcatcgttcttgtaataaaccgtcccggtgaaagttctttacaaaacatactgaccctcggaggcgagacccatatgaaacaggtcacccacatggaacattctttctacattttacaactttactatgatcctctgccacaccaccaaccatgcctaaaacaaataaggatatagagcagcagatccagctggccatggactctctctcagaccaatccaagcctaatattcggaagactgcacgagaattcgcggttcccgaaggccgccttcgtcggcgctggagaggtggaaaatcgctttttgaacgacaacccaatggtcggaagctcaatcctgcacaggagaaggctttatgtgcaatcattgcttcctttcctgcggtcggatcatcaataactcgtcgacaaataactgacgctgccgattcaattctgaaggatggccacaacgaccctaccacagaacccccaagaatcggcgaccactggctaaaacgtttcctgaaacgtaatcctaatctgtttcctactgaattagagtcatccaatccacatgatgataatccaccccggccggataccccgtcagtcagctctgaagacaccgagtttagcactccaaaaaccgccgaggaaattcgaagaataagcgatcgtctcaatcgaaccgacccaaatactcagcgcttcaaagacgggctagcaaagcttgcaaagggtgctgaggcccaggctactttggctcttcagctacagcgggaactcgatcgtacacatgctattatgggggcacgcaacgcccggtatgacgctcctcgccggaatatcccaattgctggtatcatcaattcatcctaggtcaaataaatgaagcgaaaagagtatgaattgaacgagacagccgatcaagaaaaaatgaagcggaagtggaagaaggtcttgatcgagattaggaagcgcggaaaggccaaaaaacgtgggaattaattctgtcttgtattctagtagtaattggttaatgaacacagttctttaattagatcatttcattgactacgaggtggtgtagtagatggtacttgtagtaaaaagtaaacaaaatgttccatatgggtgatctgttctcgctcgccagggtccgtatgttttgtaaagaaatttcaagagccgatctaaattggggatatcgtgccgacctgccggagtccccagcattgcagcaaacccacatgcatttgcctagatatgcatgtcacaccatgaagagtcttgtcttgttagtctgacatgcggggaaggaaatcaacggacgattcgggccatgtcgtaaataaatgcccagaaacagccctagagcctaaataacgagttgcccttgtagtatacttggttcctgtgttctatcgtaagtagctcaaacaggctcaagcctgaaacactatccagccactctaataatacgcccgaagacctaataatccttgtccaaccacacgtgtccgggagatggcggaacctgcccttcgcaagctcatatacatatcgtgccaccattcgtcaagacattatcgtgttggagccggtttcacccaatgcttaccattacctcaagaatccgcacgttgtacccgctctcattcgcatggacagtttcaaggatacgacctagaaacagcgactcgggcgccatgaactcctagctctacccgatcacacaacccgtatattctcttgtcttctctcatcgtcgtggttccgggatctcagaatgacgatcaatcgatatgtatgtataagacatgcatctccgtaaccgggttagaattgtcagcaagggcctagatacatagtagggttgttgatattctacgtagttgcaaagataaaatttatcgttcggctttcggctgtaaagtaagccttgcatggtctctctctgctcctttcatgcatagctgaaaactcctggtccaaattatccccttgatctgaataccgtactactactagcagataaatgactataccatatatcgccaatcatacgataccagattggattgactatagcatttcttgaacagaatgaggcctattttctagaatatagagtaagtagcatgtcgtcccctcgtcttctaattggcgcgtacgcatagtaagatttattttctgaattatctcgcagcacctctggtataggcgaagagatcatgcgctatggtgtaacatattacaaactcgaagcccgctatcttgaccatgaaagaatatatatcagcaccaacgtagctgttgatattcatttctatgggctcaccatccttcatggtagaagaacttctatcacaccgctggcccctgggtgtgcgtaccgaccaggcttcggaatggcagcgaagcatttaatcggtttgaaaccgcggaacttcaaggtacccaagaccacactgaactctacaaactttcaacattcgtgttcacgacaaattgacctcaaaccagatggagcatcgatcattgatatagagtcactaatcgatgccaatcgaacgagggacatggataaattgagagccaatagcacggagctataccaatcgagcgaagatgggctctcgatctattcgctcactgtgcgtggtttcaacttccagaaaacttttttcgagtcttctgatacataagccagcacccctcgagttgctacgaggtcatctttattgactatataagcagatacatctacggatgcgagtctttgtaataaagatgagagctttgggccggtgttgatatgtacagttggccaggttggttatgcaatggaggccaaccctccctcctcaccaataatcatatcataattatatgagggcccacccccctcctcttcctcctatactccccacgacagcacctcctggctcaaattccctggcccgcttatactacagtgccatcgggacccgcttggtcttgattgccatcagggcccgcttctccttgagggccattggcattggcagcgatcccagcagcgagctcgacagcgcgatcatccgcctttctatagcagctgtatcaaagaaccaaagatcagcatattattcctacatatcccacacaacgaccaagtgacataccgcttggtacagaacttgatccactaagatgtcaagaggactacctggcgtaagaccggggcaagcgtcacaacccctacgacttttaagccgaaagaaagtcccttctcgtccacgagttggacgaggtcggccgcttcgcccgcgcggggttggagaggcactggggctagaaaaaagggttagaaagaggccaaaaaagatgccaagaaagagatcaaatttacaagcccaggccacggtaaaaaaagacaacaaaaaaaggcttaaaagagacattttgttcatggatgtgtatgttttgaattgatatgaacgtgaagttcttacatggactacgaaattggtttattgactacagggcaagcaatggcttctaggaaggtacgaggctgcaatttctcattgggaaggtacgagcctccttagtcgggtacattcatcaagatacagcaatgatatagtgggcaagatgcaatatccataaattgaagcgaatgaaccagatgagttaatccctctttgttgccgaatccgtgtcttttgccatctgcccatagctcggtggcgcgtcaatcatatcaaacgggctgtcatagctatcaccgacaagcccccatattgagactcgcgtgatccggtgcttggtgagtttgctcacgtcttcacggcgttgttctttcaacaatctcctatcttcttcggggacgtcaaagcctcgagctcgccgacaacatccacattcgagagtacaatgtccaactccaagcctccgcgtaggatcgatcttacggtcaagacaacagccacatccacgagcacagcatccttgtcggccagcacaatcttcaacgaggacgcgatgcatataccatttaggatgggaccgccatagctcaaacgcatttcgctcatacccatcttccagacaggaatgataatgccaccacatttgctccaagagccagtatttagcattcaaaatatcaagcctctctttggcatctttgagcgagtcaagcccctcctcaatagatatctcttcttgaacaacttcccggagatcttcctctgtaaagagaagcttatgtgagataaaaccaggcctgcaggtggcattagggctgtttgcttcccagtatcgatgcaagcgatatctttggagaatattgatatccccatctcgttcgagacgctcttcccaaaagagtttatcacctttcaagaaagtccccactgttctggatacttgctcacggctcgattttatttcaggggaggattctgttttcgcagatgattctatcttcccagaggattccgtcttcccagaggattccgtcttctcagaggatttccttctgggacgggacaataaaaacagcatctttgatgtttgagtgaattcgagtacaaaggatgattgctcggactcatgaaattcatccacagtgctgtcagcttatacctccgacacctaaaaggttgggtgatgacttaatcttttcacaatagaagctcgcttaattagatccgatcccaaagtgattcactttgggatttaggtttccgatctagcaaattcccgaaggctctagaaagttgctcttgtctttggccaagactaggttaggtgtactccgatggttccgtttgactttgtcgcagggaaggggggtatcctgttacagtgagtggtcataggcgcgaataccgtcgatagtggccctccaggagtcgggaaccctcgacagttgaagccgcagcagattatctcaatatagcccacaagcttggtgtgtagcgtcgtttccggcccaaccgcttgccttcatatgttcctggttctgctgaaatcttactgggcagaatatcgttattgaattaccggaggtagatatatatagattgatgggtttatgtaaagaccaatccagtgctataacaccagtaagggtggacaatatatgcacagatgtactcaagttctgattttcaaagtgcacgagcatgaatgtaaaaggaaaatatccaaaactccccgacccatgatatcatcgagaaaaaaaacagcatacaaccctattcatccacgcaggaggccgaaaagtcaaaataacaacgcggtatttcatctccagtcattatcgacccgtgatataatctcggttctcgatcgtcacactcttggtcatgtggttaaccttatagacaccgacaagtcgggcagcaagctcaaactagacaacatgttagctatgtcaacttgaagcggtcatcaacggcacgtaccatattgtttctcaatgaaatgacaatgaattgggcatttttcgttcgttccttgatatacgaggcgacgatggaaaccttagaacaagagttagcatacgtgtccatcataattcgtataagatcaactcacgtttcggaagtccagggcagcatcgatctcgtccatgacatagagcggagtaggcttgtagtggtgaagagcgaataccagcgccaaactggacagggtcttctctccaccagacaagttgctaatgttcttccagctcttcttaggaggcattaccgagaacaagatgccttccgagaaggggtccaatgagtcgaccagctccaactcggcgttaccgcccatggtgatcatctggtacatttctttgaggcgcaaagagataatgccaaatccttccatgaatccattcaagcgagaagatcgaagaccgtccaggcgtgccttggcaccgtctcgggatgtcaaagcgttggtcagatcggccgagcgtgattcgtgctcggcagctcggcggcggtactcctcaatgactgacaaatcgatagaggcgttttgaactttctcctccaaagcagcaatgacagctttcagggaatccttgttcatggcctctagctcatccttggtgtacatttgaagctcagtaggctcctgctcttcgccaatatcgctaatgttctggacggtcagctttgaaagcttctcctcccagtaacgactgcgtttttggttctcagccagggctttctggttctcttccaatttatttcgcatctcgatttcagcagctcttgtctcattgagctcagccacctttgcgtcaagctcgtccttcatggccttcagctcgccctttttagactccaatgcctaatgatggtcagcagcaaattcaatacactcgcggatcttgggtaaattacctcctgggcttcgtcggccttctgtctccagtcggcagattcattggtctggttggcaacagcttcttctagtttttccaactcctctgcgatctgaccaatctccttctctgagatatcgcgggctttggagtgcttcttgatgagtttgtcgttcttggacagctgcccctccgcgtttgaaatctcctcagcaagcatgccaatctgctctttcaggccatctaccttcgccttttgaccgcgaagccgaacaccaccgacctccatgatcttgctctgcaaggtctggatctcttcctcaatgccactcttctcttcattgagttgagcgatctgcttttgggctttggcaatctgtttttcgagggcagcaacctgggcttcatctaaatcagatggctggtgctgtgcgcccagctctttcacgcgtcgctgggcatcagcaaggctgcgcttggtgctgtcaatttcgatcataatcttttggatcttagtctctaagcgtgggatttcctccgatctttccttcatctgagactccacgtgtcgctgcttttcctggaaagcctggaatttcctttccagttcctcgagatcggattccaagcgggatacctgctcctttgtggtgtctgcgacttgctttgaggacataccgcctcgggcaacacgggtaccaccaccgctcattgttcctgacacatcaatcaactggccatcttctgtcactactcgccaccggcgagcaccataggcaatacgattcgcctgctccaagtccttagcaaccagcgtgttttgcatcacactatagaaagctggggcgaacttgggatctttcggcttgacaagatcaaagagacgaggaacgctttcaggtgtgtagatcgatgccatgtcgcggcgaggaagacggtcaagaagaatgaagttcgctcgaccaaggttgttcttgcgcaaataatcgatgcattgctggccgacttccacggtctccaccaccatgttatcgagagcaggacaagctgtagaaatagccacatcgtacttctcgtcaattgtgcctagattaccaagtcggccatggaaaccatcgatacggccagattccttgagacgcatcaacccagtcaagacgcttccacggttttgtgtgcttgcgagactgactcgtgcctcgtctgctttctgacgggcactagagacgtgcgaacgaacctcgggctcccgaccagagtatttcttcaagtcgtgtttgagcttctccacttcagactccaaggtctctttttgagcttgtcgctcttcgagttcgttttgtttggcttgcagactctcttcgatggtaacaaccttgccctgtgcttcttcgaggaggacagcgcccgcattaccacgctctcgcaagatatctagctcactctgagctactgcaactgcggactgtttctcgttgatcttcgcgttccatggctccagagacttttgcttctcggcaatctggtcagataggccttgcgtcttgccttttagcccctcgcggatggaattcagttccttctcttctgtcaccatctccttctcgaattgagtggtttcggcagtcttcttctcaatgtcgtaggtaaacttctcaaccaggctctggcattcagaagcagcaaggcggctggtctgcatggctttctctaactttttctgtttgccgagcaagaatttcttcttctcctcaaacttgacagactccttgtcgtacttggccatctccttgagcaaggtttgagtctccttctccatcgactcgtaatggcgaacccccttcttgtaggctttttcgagctctttgataccggattcgtttccttcgtgtttctcgagttccatgttgagtagctcctgcatttggagaatggcctcttccgtaacacgaacgttatcattgcactcgtcaatgtaaatttgatatagcgctgattgtttctgtgccaattcgttctcctcacgtatgtaagccaacgctttgtttttcttatcctccaaggccgtcttctccttctccacgtgctggacacggttgttcttctccacgcatacgtcgttgagagcttcgagctctgttgccgcttcatcgataggtgtcttgtacttggaggttccaataatatcttccaggtattctaagaggccttcgtcgtgttcgttggaggctttgggtttcatctgagcgatcgactcgacctcaccctgcaaaatcaggaaccgcttgtggtcgagatcaattccgcgatcgcggaggaaggccgtcacagcggtgaaattggtttctttcttgttcatgtaatatttgctggtgttattcttgaacgctcgtcgcgaaacaatcagttgggaatctgggaccacttcctggccaccttcgggcaaatcgaggacttgtgagaaatgaacctcgacttcacaaaatgcaaggttgggatactgagcagagttatgaatcagcgcagagattttgccctgtcgcatcttgctggcgcggaaaccaaatacaaacaggagggagtcaatcacgttggactttccggatccgttcggtcctacgacagatgaaaaggaggcgtggaacggtccaacgatctgctgcccagcgtaactcttgaagtttgtcagaataaggttctcaataatcattcggggcttgggcgccgcgggctcctcgggcgcttgaggggcctgcgttctagacttggccacaatgtccataggcctctccaagactgtcgagttcgggtttataatggaaatttgagatgtgggcacttccaattgtctcgatggcgactgattcacggcagattcggtgatgtcggacaacggtggcacgcttgctcggtgcgctctttcacgaggctctggcgattgggatggctctggagttggaagtgagccctgtgccggcttgagtgtgattgagccgtgactcttgcggggatgagccatactttttcttttcaacgccgctttactggaaggagattctggatctacttccattgacgccatcctaactccctcgtcattctcatcattttcttcgtctatatccatcgcatcaatgtccatcgcgtcggtgtcggtgtccatcgcatcggaatcatctgttggcgcttcttgggtcttgctagcagcgcgcacagtagaaggtgtgacggggtctattgtcattctcttgctcgatgctctctttgcttttttagggactggagtgtactcctcctcgacctcgtcatcgtcatcgtcatcgtgcgtattgggtgttggtgttacatttccggggtcttctgattcagatgtatcttcaatgacataactccgacggggcgcagagcggcgcgaagccctgccctttacgactgaagccattttgtgcagatcagtgggatgtctgctgcatggagaggggcgatagtgttgtgcggaggttttgtcagttcaaagtgggttgtttacctcgtgcccaaacgggtaaagtgtccgctgttctgccacaacaagcccttcaccgccatgtcccgctgtaatttaccgtacggtaattactcctccgcggagcttcatggggatcagcttgggaattgttcacacaaaccatcacttctctcattatgcccagcatggctccatgggagagcttcgaccaagccttctcatttaataagaaatattcatatgagccaaaggtttttgaccagattctatccaaccggcgctcgttggaccagctctttgccgatcgactcttgggactcgtcggcatccaaggaggtattgtgacttgaagctctacgcttgaagcctcgggctaatcaattacctctctatagtgaccaagatctacccgccgaggaccaactcagatctccgaacactgttcggccacatcgtttcctcggacctcgatatccatcacaaacagtccttgatctattacatcctgaaggactgccgcactgcgccagaagcttcgtctcagtttgcgcaacaatgccacctgccagagaagtaccgtttcttcatcgaaggtctttggcatttggatagactcgatttcagggtgagttgtgaaccatcttgagggcggtcatcttctgacaattccatgatataatagcgcgcagtggagcatctgactgaaccctcgctcattcctacctttcccgatgagattctctacgttcttaccctcacaaagcttcccaagcatgatgacagcctcgcaatcgcctactacctcactgcggctcctcctcttgcaagcacaaagatccgcaaagctttcttcgatacactcgcccgagcaaacctcaccgaggcattctacttcacgcgcaaatacgacgacactcttcgtcagagcttttttgagcagttggtggaatttgttcacaaggccacccctggccaaaccagaagtagacgtgcgatggaactcgtcggtcttccacttgatgaagatgaagaacagtggtttgagcacgtattactgcagggcaacgctagtacccttcctggagctaaggatactgtgatgatgcgacgccttgcaactgggcgaactgggcaactcaacccggagcttgaatccttgggtggcaaaaaggtcgatgggttgaattgggatgaccttcgggggagcatacgacacacgtagatgatatacccaaccagtgatctatactggattcaatgtttattggttactcaaaaatgaaatagcaatcagctttaatagttttaatggctctgaatgattttctaatggtattttgttttctgtcggttctgtgctaatatatacaactctttgttgatgagattgcatccactatatgagctggattgaacttctatatctcaactccttttaatctcattccgaggcaaagaataaagcaataaaaatccaatctcatactctcaaacattaaagaatcgtgctatacaagagtgctgtgagtattttgtaggcgttccgataagatacggaccaattccgcgaaaagtcctaaccacaggagttcagtgtttttctcttcgcgacaaccaaaccctattcttgattttctctcaaattgcttgatcacatatcgaaggatacggattaatccgagagaagccgttgagatacaggccttgctttggaggggagcagttgagcaaccaccgaaaccgcgaagatggtggtatgcaacttttttcagcagggtcgctgcaagtttggaggtatgaatctcttgtgtgtagagaaatcaaggcactaatatatctgaagatcgctgcaagtttgagcaccctggcaaaccgactgctggtccatcggggaatcgattcggggctttatcaggaggatttggaggtacgttcaattggattgttcttattcagcgttgctcgatgcggagagtccatttattggacatatattgtgtcgtgagattgattgttcgatctcgatgttcatttgttccccccatctctttctcttgctcttacccttctacccctgctgggcttaccccaaactccttcgagtccgaagtgcaacgaatgtttccctgttcaaaactatgatcaatcctgtgaaccacatgcccccccttcgggctagtcttcttccaaaccctaacgacaaaattacgacaggtcaaaaccagactcaacaagtagccgagtaagtcgcatccccagcgccttcagtggattcaaactgacaacaggcagcccagtagtgaaggcaagcgaaatcaagcaagatttgaccgctggccagggccgtccggaatggatcttctccgcatatgcgccccacagagatgttgcgcgccagctgttcggcggagctcaccgcgaacgcagcatggaagagatgcgcttgcgccattatgaattagcagcagccggtaacctgaatgaagcggtccaagaagcctcgtctctgtggcaagaatgcgtgcaacagatggaaatctcactgaatgacctgaatggtgccgtcaaatatatcgttgacggcaagaatgaacatcctaatcgactggacattatcgagggaaagacccagactgttaaccaagctccagcaccatttggccaaccctctccattcggccaggccgcgcctacacccagcattggtcctgcacctggagcgttcggtgctccttcctcgacatttggccagccatcaggagttgggcagtcagtcggattcggtagggcttcagcaccagcgcaaccgtctggcttcggacagaattctgccttgggtagctcagccttcggccaaacctccatcttgggaggtcagtctgctttcggcaaaacacctttcggccagccagctcttgctcagccaggagttaacccaagcccattcggtaagccgtcagctctgggaggcgcggccccattcggggctccatctgccgcttcacctttcacccaagtagctcagaaccagcctgctggtggtgggtttggccagagcgccggacaacctgctccgtcgcctttcggtccaaccgctggacaatctggcccgtctccatttggccagccagctgccaacacgagcccatttggtcaaccctcagccccggcaggcgctgctccattcggtcaaccttcagccccgacaggcactacgccattcggccaaccgtcagctccggcagccgccgccccatttggtgtttcatctgccccttctcccttcactcaggtaccccagaatcagcctgctgcgggtgggtttggccagagtgctgtacaacctgctccgtctcccttcggccagcctgcagttcaaggcgtgccggtgcagagtaccaacgccggccctcgtgcatacatcaaaatcgaaaaccctcaagacctcaaccctcttccacaactggagggcgaaactcgacataacccatccactaaacaactagtgatgtggaagggccgccctgtcaagtatatcaacgagcatccgtgctaccttcacccgcaagacaacatcacctttgtccggatcaacttccctaacgggccacctgatgctgctggtttgaaagacgcacacggaaagcccgaggaatacacaccagaagtcgttgaggcatatcagtttttccttcagaatggctacttcaaggacggcaacattcccgcagtacctcccaagcaggagtggctcagtttcgacttttaatccccggagagagcattttcttgtccttcattttattgttattcctatcacgcgtctcatgggttgagatgacgtttaagcaacatgttccgggcgtgcggaacattgggactggcgcttaggagctcaacaatcaatttatgcatgtagcaattcgaagtgctttaatttcactttcaacgcacaaatttacggtctaggaccactaatgagactctttctttgtttcaagatgtttccattttttattttttaaattccaggttcgaacggaatcccccgcagcgcgaaacaagtcatgcgggccagaactagctccaaagtcgtgccgtgcactccaaattggccagtccacgatccctccccgaggcaagcccagcctagcgcatttatgcggcaatggtgacctcaacctcaacaccggcctcgatgttgatgatgatctgcttgacggtctcggtgggggcgagaagacttaagtagaatgtcagtaactgcatctgctatagcacggcgatactgccacaactgaatgggcgggaaatactcactcgatgagacgcttgtggatgcgcatctcgaacttgtcccaggtcttggaaccctcaccgttgggggtcttacgggtggagatctggagggtcttggtgggaagacggacggggcccttaacctggagggacttggagcgggcacggtcgatcagctcctggcagaccttctcgagggaggcaaccttgcgggaggtgagggtgatgcggatcttgtggaccttctgtagagcggagaagcaattagtacatagtttgcactggcgaggtctatggacacattgcacaaagcgacagctacatcagggtgtagcagcgattgcgacagtgaccattggatcaggaacaacgtacagggccctcgccgaaatccttctcgggcttctggaaagacatcttgaatttgtatggactgaaacgggttagtaagtcgattagggaatttcaagagcagaaaaaagggagcgcgcacaatttaaaaggcgattgccgtcaagacctgaactactaggctcggtaaagtgatgatggctgttggagtgatgtggatcgagaattccatatccaaaatgttcagtgcgaaagtcttggcgcttcggctatcgcacgctaaacccctttaggtcccctttcagtagttgcttatgtcatcaccaaaagaggacaagagactgccaagtgatggcattcgaggtgatgatcagggctgacaggtggctacgcgtttttcctttgttcttgcttttctcccccttgtattactctcatattcccagtcataaccaccttagatcgccccaatggcggagtttccggtgctggctccagtgccatcccccgcagtgcggaggacaatcccatcaaatgactgggaatcttgtctagatgcatggatggccctgttggggattcgcctgaatgcatcagatcaacaatttaaggttgtagcagctgaagatccatcaatacccccattcctgggatcttactaccaatatacggctgcgggggattctagtctacaaagtggacctaaagctcgacagcttcggaagctgtgctttctggcgacaagaagatacatactcgatctctccaatccaccagatggaattctggactggaggtttctcggcaatctatgttgctgttacccttctagcgcggccctgaagacgtcattatcaagtgcctgggatctgcaccagggcaagatcacttccagtatggagagagcaaaagcagttgtgattaagaacctctcttcggccaactcatcgtcaaaccctgaagtaatttctgacatccgccgtctgaccatccttgcttcagtgctgccagcgtgtggccaggagctcatggcaggctccgacttcctggatacgatatcggaagcctaccaggcaagaggtgcccgggaggagtttcgtaagattctcgttgctaatatctacgtcgggctcgtttccttattgaaggagccagtcaatttgtcttcgttattggatcagctgttcagcctcaaagccgctgctcgagtgggagcgccaaaaatgaagagggaagcaactctactttctgatctcatctgcagctcggacttgcttattcggctggacaagtatctgagcattcacccccagaaacggggacaagatcttcttgccagcttgcgcacctatcaggtggaatcgaagtcactacaccatcggtatcaaagacgcaagaaagtggacaaaggaaaagaagtatcctcgcatccgatcgtttcaggggaacttcacgcacacaagatgtcactagtcactcaagtacaagacctcttccctgatcttggctcgggctttgttgtacggctactggactgctacaatgacaacccggaaaccatcgtcgcccacctcctcgacgactcacttcctgttgagctccagtctctagatcgatctgagcaactacctcccacagcagaacctcaccatagccatatgtcaccccacccaacaccacccgaatcgcctacgttggcaccactaccagcccgcaagaatatcttcgacgaagacgtggacatcgccgaactaagccgctctggcgaggcgcaaggaaaattgtacttcggccgcgccgacccagaccaaacagccgacataatcctctcagaccacagcaaacacgccgcaaacaaagcagcgatcctctccgcgctcgcaacattcgactcagacgacgacgagcgcgacgacacctacgacacagccgacgtaggcggcgccatcgacggagccacaggtggggcagacggcgaagccgatccagccgagcgcaaccgccgtgcagccgataccgaaacaattctcttccgaacatacaagtccaatccagggctcttcgcccgcgactcggcgacccgccgctcccagccgcgcggatcgttgaagcgcgagaccgaaatgactgacgaggctatcgagggctgggctctcatgctaacgcgtgatcccaagcgtctcgcgaaactcgaagaccggctggcgatggatgctggcgcgttggctggtgctggatcacttaaccagcctgagttgcgtcctacgtcttacaggaggccacagcctcgtgagaatggagacgagggttctgatgagggcgagtcttctggccatgctggttcgcggggtggtagaggaggtggtggccgtggtggtcgggcgcggggtggcggcggtcgtggcggtcgtggccgtggtggtggtccttcgtctggtggccaagggcagccagatactacggtgtcgagacagaggaaggaagagaataagagtagtcgggcgaatcataaccgccgacagcagcacgcgaaaaagatggcgcgtggcggtgggttgcctggctaatcacacgaagggatcaagctggcttgtatggatgcaatgcggcataaccgccttggtcattctctatttttgatatctagtaatgactgtgcatgtaatttacataacatctgttgggcttctatagaagagccacgacgcattgaaacagaacgcattcaagtaattcattaatatacctcaacaaatatagaatgcggtatagacagtcatcataacatgttcgcacagggaactcacttggccagcaaggaactgacgcttcgtatcagtggtgatctgagaaggctccgccttcggtaatggacttgcggcactcctccatgaggcggacctgtttcgcgacgtcaccaagccggctgataacctccttgttaccatcatagaaggtaaagatagcataggggataccagtatcgcggcagaactcgatgacaaacttctgcgtacgacgtaggttgtgacgcggaatccgcgggtagagatggtgaatggcttggaattgcaagccaccgtggaagaaatccagccatgttgggcagtcgacgtccatagtggtacggagcatcttctgcgcgaaggactcaccgactcctaggtcggcggttgacatagcgaagtgggataaggtgatttgaacgtgtagtggtgaggaaacaatatgtgagacgaggaggaagatgatgcggctgcttgcatcgggaagcgtcttgtacatcacaccgtagccaaaccaggtccaaaagaagacctgtccgaccagctcaaaccaaacatgccaccaagcagggcctcttctaggagcttggcccttgagtaggtactcccaactcaagacatacagattgaaccgagcgagcatcataatagggtagtaagagtagttctggaatttgagcagaaaccgagccggggcatcgaaagtcatgattcgatcgtaataggtactccgtaggctcgtgaggaagcggtgcgagatagcgaagaatgggatatgctcgatatccgggtcatgctctggctcattggtcacgatgtgatgaacgttgtggcttcgtttccaccacccgagacttaatcctccgagatagtctgcgatgaatattccaataagggtatccacatggaaattgtgtgtaatgcccatatgaccagcatcatgggcggtgaaaacaagctgatgccagaaacagccgaggaagaatgccgaggtcgcccaccatcccatgcggaggaacatataggaaagaccggcaaaaagggtataccgacaacattcaacgaagtaacaagagtagtcgcagtcgtaaagtccctcggccttgatacgctcgttcagttcgcggtattttcgtttgatctcttcctgacttgcggtatccaaggaggggtatttggcagtgtccaagacgatttcctcccgtgttctcgcatccaagaaggcaggcttggcttgaggttggtcggtcaaagcagatccggccgctttccgttgacgaactgtggatttcgagtcgaccgcatcgaatatcggcgagggaggaactgatccatcttggctggagccactggagcattcttgtgctgttgaatcctcatcactcgcgcacgtgtcttcggcataagcacggaacgtgccgccctggatcgggggtcggaaattgatccatgtcccttcaattcgtccaatctggtacgagtgcatgcgcttgcgggcttcttcggaatgtagcctatacgaggccggtgtcaattagactgatcaaaggtggtggtgtttgccgttccaaaacatacgcgttgatctcatctgtcgcatccctgcccaccatgtgcttgattggcttctcccctccgggatgatatctgatgaatgggtctaccttcaggacacggccctcgaagattatgacatgcttgccctcagctatcaggccttcaatatatcgtcgagtcaagagggtatccttccgggacggtcgggatgcggtcttctccatagtatgcggtgcggtgagaggatggatgtgtgtagggtcagataacatggggttacagtgacattgctgagagtcgaactaagcaactcaccaaaagcatgcaaaatgcaaataaacaaaggaaacaagaatgagattgaaaaaaggcagaaacattccaagggctatggggcggaggtggataacagcggggacccgatcagcgtgcgtgattgtcacaccttcacattaccaacataccgaggcacgtaactttttgacatggcagtgagtctcgaaataaattggtgttggctacattgctctaatcattctatacctatagcaatcaatttcctccttgactgagcaatggcttcattgggaccaggtcaatatgattcatgtttcatctcgtggcatgatcccgctgactcgggtatataggatcatacaactcgcgtggaaatagaacaacttcgggactctaacgccactgatgagctggaaaagcgccttcgaaatcgtacgtccttctatgttgatcctcggcgcgtatctaattcgtgtatacatctaggcattgagttcggaacagctggtctccgaggccgcatggccgcggggttctcctgcatgaactcgttgatagtcatacaagcctcccaggggctggccaagttcgttcgagacaagcgtcctgagatcgcttcgaagggcgtggtcattggacatgatgcgcgtcacaattctgcgaaattcgctgcactcgcagctaacgctttcgtcgcacaacgcatccctgtttggtttttcaatgtggaaggaccaacacccatggtagcgttcggcgtgaaccatttcggtacggccgcaggtattatggtgacggcgagccacgtaggtctaccccgaaactacttttatcgatggattggctaatcggctcgaagaatccaccccaggacaatggtatgttacccatttctgatgctgtaaaataattgctgactgttttataggctacaaagtgtaagaactatgaatgtatatcatggagactgctgacaagatctgccttgtagctactcgagcaatggtgcccagatcaaccgacccgaagacggcgagatagcacagtcaattcaagaaaatctcgagccatggccgaccgcatgggcggaattacagccaggcgaattcctgcacgcggattcctatcagaaattgctgcctcactacagtagccgagtcgcagagttcacggtacgttgtgggctgtgcttcaggagatcaatctaacgagtttactctagaaatctacggtgaccaattggcagcccccaaaaccgttcgtttatacacctctgcacggcgtcggaggtttggttcttccaactttgtgtcactcacttggaatcaatgactttgtatccgttgctgcccaggaaaagccagatcctgaattccccactgtgaagttccccaatcctgaagaggctggagctttggatcttgctatcgagactgccgaccgagaaggaaagaccttgatcatcgcaaatgaccccgatgccgaccgtttcgccgtggcggagaaagtggagtgagcctcgatttctgactaccgtcaattgatctgaactaacatgtttccagtgggaaatggcacactctaactggaaatcacgtcggtgtacttctagcgtcccatatcttggattcgttcgatgccagcaaagattggtcccacatcgcggtgttgactacaacggtgtcgagcgggatgcttggaaagatggcagctgcaaagggaattcacttcgcagaaaccctgactgggttcaagtggatggctaatatcgcccgggacttggagaaagagggaaagaccattccttttgcatacgaggaggcactgggatacatgttcccagctgtctgttatgacaaagacggcattacagcagctacagtcttccttgcagcggaggcgaaatggagagcccagggattgactgcatatgcgaaactgcagcaattgttcggcgaattcggccatcacgagaccttgaataactacttccgatcacccaatccacagctcacttcaacattgttccagggtatcagaggcagcccgggcctcgccaatatgcagtttggccccctcaagattttacgatggagggatttgacccagggctatgactccagcacccctgataacaagccggacttacctgaagatccaacaagccagatgattacgctgtggttggagggcggggtacgcttcacatttcgaggttcgggcacggagcccaaggtcaagtgtacgttttcccactctctttcgagcgaaccaattactgatatatggacacagtttatatcgagagttgtggagactctcgcgaagacgctgtcaaagcagtctgcgatgcattcctcacgattcggaaagaatgggtacagcgctttacgccctcgatgacatacagcaagcaactttcgacatcgtctggtaacattctgaccgttgaatgaagacgtgcgtcagatcaataattggctgagattctcgaatgaccggcaggttacctgatgtagccaaggcgcccgccgcgttcgcaatgcagagaaatgtggtcaatatattgtgaacgagtgtaaagatggcaattgaactactgtgactagagagatcgactgcctccctttcatatatgtacaaagggtcatagcgagtgtattctctaatttacttccctccgtgatgctgatattagcttcgaaggaactcctgtgtctaggggagctgagcgaaaggatttgaggcctatgcacaaattcttgactctcatctccgcgatcaccagcggaatgatctagagtggatcaagtcgggcaaatcaaaggcggcgtgcaagtgggcagtgactctcctggctcaatttctgctatcatctgcacctcagtgtcatccgcttgtgcttcagtgccatcgggaccggcagtacagaggtcgattgcaaaagttctgtcacactcattttcacggtagtataaatttactcctaatacaatgaggttgtttcaaactgctgtttcgattccgttccaatttgattaaatacaacatacattatgtagtttaataaagcaaccaactaccttccgccttctaaagcaaaaataaagttgatacagaacttttgaagtcgacctccggccatcacgacaaccggcctaatcgtttattaccgccttggttatgtggggctcactgcgtactccgtatacttcgaagtatgaagctattcagagaccacctgatctgtcaatatgaaacaatttaaattattggaatcatgaatggaattgctgctcgtaccccccaggatgacaccggcctaaattttcagtaccgttttcctaagttggttgagtacctagatctatataccagtcgaacaatccgagggcctttcagccttcgtggatttgtccgagaactccgggagaatgagagccccttgaatattgttggtgctgtacatgtcgccgaactgaatcccttcttttgattcatatcgctttcgtgagtaggctctgtagatcgagccggacatttcgtagactacggtggttctttggattgcgaagtcatcttcaggacctccaaaatcttcagagtattcgagaatatacattttgaagggggccacgcatcaagcaagagaaaaaaaaagcaaggtcgattcaggtaggtaaccggtctgggagtcacaagatgaagcgggtgccgacctagttgcgattaaaagggctgtttgcactttctcgtcagccaaggcttgtgagaggagtcaggaggagcatccaaattgggattcctccttcaaggccaaatatatctctcgatcttgggcgtatcctcaagtctctttattcatacatcaacatgcatcatcatatgtctcgacagagcaaggcgaggaggaatattatcccacaatgccatctaacagaaacccaacaaaacaccgactgctatgatcatcatcacctgtgtcacgtccaacaacctacgccctgctcaagagaccatcacctccatctgaacaacaccgatattgataccgttaaacatcgggcatatcacttacgtcaagccccaagtaccaaagagacaattcattgttatttttgtcctaacttccaaggtcagggtcctcgcctcagaatgtaagactggatttgcacttgtgttgcgtcggtatttcttcacctctgaacgaattgcaggaacaacgtcgattccgacccccttgtacagcaccatgagatctgccataaccgacataaaagccaacatatccacctgcaatcccggtctcgatcttccgagtcgagtgaagacgaagaacaccgctaccacaccgagcattaccatactcaagggatccagtccaatgagcgacaacatcatccacctacagtcaagcacgtccactcaaaaagttcgaatagcatgtttgaccatggccatcaccacgctgcaacaccagcacaaagtacttgtgctcatgctaccgtgtttaattcacatgatgacggatgcggtagcaatatgaaagccgttagattcgaagaagatgacaggcctgagactcaccattctgattgtcccatacatggtaccccgtcccatggagaagaccggtatggtcctcatcgcaattcccgtcaataccagtcccaatgtcgagaatcgagaacttacaggtgggtttggggccctcctttacccgtggtggcccctcgacgtgaaaagacttattatgcggagagatattgagaaatcgtcatagataaattgaatgcgtatcgaatataaagtcacattctacaaatttcagcttccattcttgtacctactcacagcaacgtaaattcccccgtctgatgacttcacttttgttcgagcacgccacctttgtcttttggttcggaatggaacacataaaaagaaggggaaacttaatgaagcagctcacgaccctgttatatctcctcgcctgttggcctttcccaaagccaaagtctagctgcctatttgtgtgggcattttcgcaaatatttccaccaggctaggtctgttgggcgactttaacgcaatgtaggtacgtatggctccatgagattccatgcggggatccctgcagatagaggattacatgaaaggagtcgggctcgatttccaggacaaataataaggaatacctccacaaactctggatgagtgtgcagtatttccacataaccctcaactaataggtatgacagcgaggcgacatggaaacatcatacatcgtagctacgagagatggaaatatatcgccatgagaagattccagagagcaaacaggcaggaagatctcaggcagcaatgctgccaatagcaacccatgcggggtctgccagctcatcatcgcatacaaagctgaatgccacccatactatcgataacatgtcttgttaactcggctggaattatttaatatctgactagcgatggaatgctgcaaattatgtgatcggtcttttagtgaccggcaagcttttcaacaacatatgcgagatgctccggtacatactttgacatttcgatgcgacccctgcaatcgtacttttgtcagccaaagcgccctggaccaacatctccgagactcgcctgtgcatatcatcacatatgactgtgagccttgtagcaggtcttttgtcagtcaaagtgccttggaccaacatgttcaaaattcaccggcacatgcagtatcattcaactgtgagctttgtaatagatcctttggcagccaagatgccctggatcaacatatccagtattcaaaagcacacatcgcgccgaccagcaccccgctggacaagttcttccgatcctttccgaggttcagatacaatccaaaattacccccttcggaatcatatgcccagctcagggagttctgtggctgggaaaaagagaatccagatggggaaaaggcctggaagaaatatcaatctgctctcgaagctgaggttaagatgtggttcggagctgaggatgaccttgacgcctggcattctctttgtcgagctatcggaatcgagcctttgcctgaaacctgtaagcaagctgtgagggtaagtacttatcacgtctgtatatctgcatgtttttttatgattcaaaacggagatctacaagtatttattattgagattgactaataaattgatttaggtcatccgaggtgtgttcgtcaatatcatcgatttgatcgactgggctcgaagtggaagcacaaccaatcgagtgcaaaggttctcgagcttagaacagctacggaaatataccaaacaaacgggaaaggtattccacaatcggcttgacgaagatgatgatggaaatgttgttcttcggcatctgcttcggtttcttttcaatacaaatcgtcgttattactattgatgcattgcagaaggaggctgggtaaaatggtcaatttgtttcattctcactgatgtagataggagatcatctgcaatatatgggaaatgaaagctcgagagacaaaaggacctcaagtgaattcctagtggaccttgggaactcgtcaacttgattaaaaagatcagaacttaacttagaagtgtaactcttgaacattgcccgatctggtgcgaatcaagatgccgattcatttgcagcaagggagttccctgattataacttgagaaaattaaagagaatgacaatatgtgagaaagcattgaagctttatagaaatgccattatttcttcatctttttatatcccgctttcacattgtcattactcgtccaagatgagtttcccgtctcttttggcagcatcagcatcttaggctagcactttctttgcgccttcacaagccatatatgataaagtacgaccaaacattgatcggctttttgggtgctgattctttatctagttttggtactatttttggtactatatgattccgggtttcaattagaattaagtgaaatgtggcatacttataatagtaacatacgtataacaacagtaataacacataactagcagcttccagatcgaagcacatacaaatgacaaccctggaatgatattggaatcaatccatctaatgaatgagggatgacttgttctttccacacaatccaagaaggctcagttcatataatacaaaagacctttccaattgtatgaacatggcccctagagtagctttccttagtgccgcctgtgggcacgtcttgcatgtctcggtagcgtggccagttcggcaagcgccgtgccctgaaagcgaatttgctggacatatcttggttctcttcggtgctcgttgatatcggagtcgtcagatgatgacaactccagtacaggctggaatgcggactcgtatcgatgccccgagggatgaagttgggtcctacgcaatagatcttctgtttgcacctgcgcagttggagccataccaatagcacttcgtcgagattgaccgacagcagaagggtatcgagtacgatccatcgccctattggtaagaatggtgctacgccagtcgtttcctggcgtttcggggaaaacatgacttctatccaagagtctggaggggactctttcttggatcaccatgcccgtatgaccgtggttacgtgcacatatatctgcgtagttctcactggttgtgaaataagccgcagctgccggtgtcgatgaaggtccccggcacccccggtaatgacctcatccggatttcccgttcgaatgtactcttcagcccgctctcgggcagaacctcggtagattacacgggatggtctggacctcatatagtcagcactatttaagtgaggtatcggaggtagtttcacgtacggcccattagccgtagcgggatatgccgagctggtttcacgaactgtttcaggaccgtaaggaccaatgatgagtctcgactcgctcgattgccatgatccatagggggtatcatagtaacttatgaaagaatagatgagtaccgtttgaaataatatagatgatggcatgatttactatagcacagtgcgggttcgtgtgtcatatcgtggctgtccgtccaagatccgtcgatgagacatgtgggcaattctctggaagtgcaaagatatcagctcttacactgggttatgccaagaaagggctataggagattcgatacgagagaaagacaaggaggatgtcgaagaccttgagcaatagaaagctataaggattgaatcaataacggcatcccttagtttaattattatatgtcttctacaaccatcccagaagcaaagggaggagaggggtcagacagacgccactgaaatcgaaaacagagcgatctaatttaggtgctttttaacgccagcttgtatttcagtatgtgtttcaacgggtattagttgagattactgaaagcaatactgctagactgacacttctactgtgctgattgtataattgaaactagccctgcatgctccaagcgctctcaagttgtgccagagctctccattgggaacagtggcgtttggacatgaggcgagtcaacctgcgcggatcattatatttccggctggcgtatgcggcaacatcctaaaactcaaatctgacaggcgtgtgtttccgattatcttgattcctctcttcgccagccaagcctttttgcagaatgtccacagcatgctggacatgccgcaatcgcactatccgatgtgactcaagcagcattccttgcgtcaagtgcgagaaagctggactagaatgctttgaacaaagaccgctacgatgggtgaaaggtgtagcaattcggggtaaaatgcgtggacatatatttggagaggaccgcaaagcttctgatgaaaatccacggacgcaactagaacagaaacaagtcatacattcgcgcacgaagtctttgacaacaaatattacaccctcgttcgccttgcaagatccttgcatacacaatctcgaccggtcatcgagattctatcttgattattgtgggttcatggcgagctaaatggtcccgtgtgtgcactaatgtcagacaagataatttacgcgtcgccaagttgttcattctatatgacagtgagagcaatccatttagaaggttgctcacttatgcgatggaaaattcaaccttgcgaaagactatagttgctgttgctgcaagacacttcgctaatgcaggccagtcatttgatcaggtcaatgatggcttgtcgcctcggtttatcaatgccaatttggatgcattccatttcaaacagcaagccatcaaggcattatcattgtcattatcccatccagagccttctcaaaaggacgcgataatgccagcaattctccttctaattttccttgatctcctcgagtccggcatcgaaggttggaaatatcatctccgtggtgcagaaggcctggtcaatctttctcactcgatgctggagcctagtgatagtaaatctatcaacggcaaccctggagagacggtagaggagacaaggcgattcatcacccgacagttttcgctgtatgattccttcttccctatggtttgtagtgtgaggtcgctgacaatagtagtgtctcaacctttggaggtgcactctcaggttcaaagtcgagtcctgaattttgtatgaacttcgacgaaagcaggcaccatgaatccattattcgaagctttctgggatgtcctgtattccttcttagagctatccgttatttctcgaaccaaagacacgtgattaagagcttagacatgcatgatgacctctcgattcacgagcatgtacaaaatactttgagtatgcttgagctgacagcaaatttcgattgtctggaatgggcgtcagactccgtggaatcaagcgtttcctcagcagcggagcttcaaaagctttctttgctatctcaagcatacaaaactgccaccattctctatggaaaacgagtgcttcgtgctttcaagacatcaaccgggccgacagcatctgacaatgaggagttggtgttgcgattacttgacgtgattgagtctctccaatgcgacccggctttgttcaagtgcctattgtggccaaccttcattgccggtctcgaatgccagactcatagtgagcaaaacctggtcattggatttctgaagatgctttggaacctgaccagttgtttgaatgtgataaacgcttctaaaatggtgcacgacaattggaagcgaaagaatttcgatggcaatttggcgtcgggggaatctgaattatatgtaatagaacaaggctggctgcttatttgatctgttgtattgcttccatgcaatatttgcaatgaatacacacggaagccatcacagaaagccaaagggtcatcgggatggttgcaaagcaactcaatcctagtggactctacaaatatgtcagcatatctagcccaataaaatatcggcttagtacttcgtgggttggagattactgttagccattaaagaataaaatcttatttcattatgcccaaatattacaagtacagctttcaaaagtaggtcgaatatctcagccgtctatctggactagtgacgacaccgcataatttaatttgagcgccacatgccataacttcctattcaggcgactagggcttaccaatctaccacttaccctgcccaataaccacttttctcggatagtgtctgacatttggaagattttcccatagatgcgaaagaatgtgaacgacatgtgtcagtgcgcggaaatttgccccggatagccccacctggcataacttcctaatcgggtaagtatagttccactctcaatcgacttcagcaggtccgagaaatatcagctcacgaaagacaaattttctagtgaattatgctgacggggtgctttcaatctctgtaggaccgagcaaggattccatttcccgaatttgaattaataacggggtgaagtgagtaatatttaaaggccatatatcccctccgttttcattactcttttagtatcattcaacggactctcaaccactatcaatttccctctactttattcaaagcttaactcattcttccgactctttccattacactatgtgccaccaggaaattgacgccaatggctggaccagcatcgcggctgatgctggcgccatcttcggcgatcggccttttatcaataaaccagactctctctctatcaccgatattaaattcccatttgatgatcctgtggttgcgaagactttgaagtatgcaaaggaaaccctgcatcccggaaccttcaaccattcgatgagggtctacttctacggtatgttagatgttgcgcatagctctagtaataccaaacatcgcatctaacatctgcttagggatggccattaccaagcagcagttccccgagcgagctgctactctcaacccagcgacttgggccttgacatgtttgctgcacgatatcggcacggccgaggaaaacctgacggcaacccggatgtcttttgatctatatgggggcatcaaggccctctctgtccttaaggattttggcgccactgtagatcaggccgaggcagttgctgaggcaatcatccgacaccaggatatgggagtggatggaacgatcacatacattggtcaacttatccagttggccacgatttacgacaataccggtctccatccgcacgtcaagggttttgccgaaatgatccacgaaaccacccgcaggcagatcaatgaggcctatccacgcctcaagtggtctacagtcttctccggtgtcattcgcaaggaggagaatatcaagccctggtgccattccactcatcttgtcaactttagcaatgagattgaggccaacaccctcatgaagcagtgggagtgagaaccgaggactcaattcttattgatttatatttgagctttcgggtcacagtggctgcacctactagacatgtaaactttcaaacgaattcacctccgaaaattgagatgcacgagttcaatttgatacatggatcatttatattacgttgtattaaacatcaataaccccccaaaagcgggttttgacgtagctatacagcttcgtgtccagatcaagaatgtcatcattccgaacatagacttttccacctcaaaactccttgaggaacttctcgtaagtggggtacagattttctgcctttcataactaacgtcgatactagtttgataagagaaaatggatatttccctgatacggctgcgttgcgtagcctggtctgggataagaagtcaaaaaccctgtacatctaagcacacagtctttattttcaacgtgactacgcaagctagtactaatgatctctagttacttcgtcggataagacgggcaaacctaaagagatatttcccgacgttatgtggatagcacactttaagctcgccataccaaactcgaagaaatggctcaaaaatgaatgagatcaagatacctcaggatggaaatggtagtccgcgcagtaaattgttctaatcccttttcttatttcagttaggtaccagaaaatgcattcagaattttccctagtggaataagattcgcaatttgggggtgattctaggaagccttagaagttgagagacattctccgaaaataatggttgatctcctcaagcaccctaagttttatgcgctggcgtgatgcacaaaggtctctcgaccaaacaacatcgataagcgccgcccattccaagcaacgaacagttcatctagcgccgaccgtcccagtaaggagatttacaactcatgtggtacgtcagccaaatatacgccgcatcttctaaataatcttagatcaatcccaggcgatgggagggattttatagatccatgcacggtgataagggtaaagagcgctaaaccgaaagggttagggctaaacctaagagcgtgatatacgatagatggaacaacctatccaatgaaaactaataaacatgcaaacagtaagcgagcaagcaaacatgaagcatatgataacgatctgtagtggatcgtcatataacccgcgaaaagacccatctagtctctagatgctgaaagactggcaatggcatttatggttgccattggccttcgaagaagaacgtggcgtggtcgaatgcagagagaaataataactgtcaagtggttgaataaacaaattttgaagaacttttgtataagttgaagatcaaaggaagaatttcggttccgaagtgagaatttaagcggtgcgtagatcggtgtcctgcttattcgaaagggggataatctagcttgttgaatcttgttgtggttgtcgtacacacgcgaagttgatcaataattgtattattatgtacgttggaatgatggtgcgaaggagctggcgagattgagaagttgacgttgaatctcggaaggtgatcttgcacgaatagcagcatccatgtgttgtacttagatgagcggtaaacttctaagggaagtattgaaatgttttggcggtatggaaatgaagaagtgggtttggtgttgaacttggacctgatatgtcttgacaagcttaaatatcaactagagctgctggatctcgctatgaggttgacgaaagtagtagcaaattcagcgcgaagctctgtacaattttgttggtattggtgatttattttgacgaagatcaagaggaggtagcgaggttcaaattttgcactggaaccgttgcctggaagtttcaaaaagaagaagaaaagtggattcagaattcaggattcaggaaagaagagaaaaaatcaggattctggatatggaggatctgagcagtctctcgcgcatggctggctgtaacgtctcggagcagtccaatctctagctcacaacctaaggtctgctgccggactgtccaaaagagaaaagatgcttcgagtgagtgagagcgtactcgcaatgagacctctgtgcagtgtacgaaagcgtgccagtacccaaaccacagggctgcgtagctgaggatcttaattgtcatatgcttacatttttgtgagcagtgggctactactgcgttattgggcggcagtttggtatatatgtcctcctttctgttgcttttatcacccagaacccgtgcatctttccacctgggcaagtatactcatttgcagtcgtgacttccaccctactctacgtctctgggacaaccagcacctggggacttgccctaaccagagagttgtaaagccacttgtgcctgcctatgatgaattgaaaggcttttgttaatttccctgtctgtctcccctcttctcttcttcttttcctcaactttctatactttctgcttaagttacagaaaaaacgacttatataatttgtttaactcctcctgcctcacgacaccgacgccgaaccctgaacccctctgtcgtaccagaaatggacgactctttgtaagtaaatcaaagatggccgcaagcaaactgctaacatctcatacagtccgcagaccgactgcgaagcgcggaccgaccgcgaagctaggtccccttctcccccctcatctgctagctatagtacagataccaccacctccccggtaaagcccgcggggcccatggggttctttgctgcagttggtgattcgtcgtcgtctgcgccgagttcgtcaagtcccacttccgacggcagcttcgctccgcgagttgacggacttacccaggtcattacggctatcggtctaacctttggacgtgaatcggggtcacccgatgagctatcctttggagatgatggcgggccggatcgaggggcggaagtgagtgttgcagcagaaacggtcaggcaagtccaattccttctgcggtatggtgattatgctggcatggtgtggaatgttttacgtaagatctcgcgactttccaacacgcctctgccagacaccgttgtcgcatttgatgccgaactcgacattggtgaagaagaccaggccgtcgaagaattgggagggccccctggggcctggcaaattctgaggcgactggtcgatcttctcaacaacagggaggggattcaaatcgacgagtctatggcaaggtcggcaatcaaggcgtacgcgttgcggaacaagctctgccacagcagcaaccttcgagataagtgtcccccggatatcgcccgcgatgccggggattgcgccacgaccggctggaccagatgtacgtcaaagacggagaggcaaagcgactgaaccaaccacggccgggccgggcaggttcagatcctttaccttacgtgccaacgatggaaccgacttactcgccatcgcgccgttaacgaacccgtcctagcggcacacggaacagcgcccctttttgcattcacaacgaaattcaaaggtaagtaagaggtaggtcaaggtaagtatggtaagtagcccctcccccccagcgaagagctcgtaccttatcgtggtgctggggcctagtaatcctttatggatgaagctaagacgagctcatatacagtatgtatctagtaacaaatatacttcatccgtatttgatgagcatgcgatccctttacttcttataagaatcaccgtttcttgattactgttttcttcgtagactgtgtttcccagtattgatttcaatcaccatgtaacttcggttgacgcctatttctaacattcttttagctcccagaaagatgcaaccaaatgtgaaacacaatgtttcatagaccgaagttcaaatacagcagtctgtgtttgcctttgccgatgaagatccgaatcttctgaatattacactcataaaaacccgaaacttaagtttctcaagcatatctgttgtttgatgctctttgtgtgtgttgctacggcgggtaaggctcatttatattagcatttcatgttaggcatttcattcacatagtggaaaggggacccgatctcaaaaaacagcaagtcaaatgatcttgaacaacagatcaagttatgtattgcctacgagccttcgatgctcgggtcattgcactgattctccgatgccacctagccatgtccgacggatctcgagtctggtcagtaatgtgcctggtggtgtgtcaagtaatagatctatgtacaaaaaagtgtgaccagagaaagtagtagaaggtagctcaccacaagcacaagctcttgtgacgtgccaggtcttccaaagataaaagggtgcattcaatacagaataactaagatggggagagaaagaagaagcaagttgcaaagtgggaggcagcctgttgatatagctgtccctttgcgaacattgcaaacctcgaacatctggcttagatatccagcaaacaatatatctaatgcaaatagtaagcaagcaagcaaacgagcgcgcaagcaaacatgaagcatatgatagcgacctgtagtggatcgtgacaactcttggtaaagagacaacagatacaggtcgttctcgccggtagacggggcggcagcgggatgtgaaaggacttggtgactgggaggaaatgtttcaagctgtagccttgaaaggctcatgggctcagttttcataggctgcagactccggatctcacagctcataactcaacctccagcttatctcgttcatgtcgctttagctcggcagaacgcatggcctgcaataccgtatagtggtagaccggaatgattaggcatggaccggggggataaccgtgatcacgaatgtctggacgatggcggctccgaaacggcacaggctgccccgggaatctttcatcaaaccagtcctttatcacaccgctccgcgttagtcctactgtttgctctcgaagtagagggtagggatagaaagtattgaatgtgatgtttttgccgttcggtatgagtttcaaagtgtcgacgaccctgacaacacagtcccacagctctaactcttcgctggggcacagtaaacagaagtagttgacgtgaatccacggcccacatttctggaatctccagcttggaaaatttcggacaagtcgaagaacatcatcaaggtagctcaatcccatgaatttgacccccattagttttcccgcaccctttgccgccttcacgatagcgtggaattctggtattcttcctccttcaggcgagcaacgaattacgatagtaagagagaggacgcgacgttcgtatagaatacgagttgtctcctcgttgaggtatcgattgcaagaaatgatggatagaccacagggtgtgctggacgtgttccacaagaaatcatcgaagagacagttccagatctggaagcgtagctctggtggtagctttgaaaattcgccgagtcgggcgaaaagtggaggtttggactcctctcgggagcaatcttggttcatcttgcttggtgtttgacttgaaatgaggtgatgacgaagaaagaagatgaaagcaaatagagatgagacttatccatggatcgatgagttccgacgcccagctctgactggcccgatgccgaattaggctgtactagtgatctcgacggcctaaggcctccaaatagtcgttgcagagtgattctgacttccaatgctacgcaaagccccctcttgcatattcatttcagtaccgccttcctaattaggtacatttccctgcctcaacaccccacatgcctttattgcggagcgaagcgaaacaagtataaatcagaaggtcttacgtacgtgtcacgtggccaagttttctctcaggggggctgaattatgacaaaagcaggggagttgatctagccgagggtcgctgtgaagccaataagccagtaagaggggggctttgcgcagcattaaagttagaatcagtcgcttcgctctgcaacgactatctggaggccctaggccgtcgagatcactagtacccccatatagtagcaagacagcaggtacctacaatttgtatgtaaaccactaacaaaattaagtcacttttatcaccacatctacttcatcgtcaacaactgctccaacaactgcttcaacaaacttcagaacttcaatatgtgctccaaaactgctccaaaattgctctatcgtcatcaggattaaaacatgtaggtatgagataaaatacgcatttctaattctttctaatcaaaatgtagggttttttgagtatgtaaacagcgcctgtgaattactgcctttttgggttagcgccccaatacgctccgctcctgatcacaaaatgagttagaacatgagctaccaaaatcaaataggagtgtccatgggcatgggtatatattggttgggagagttcttaagggaatattgctctataatcgtatgttatgtacgcacatattagaagggtctatagtgatacttgccttatgcttctcagtcatttagcgtcaacgatctgtctctcaactgtaccgttgcctcgaaggccttgtatgggccgagtccttttagggcatcgaggagtgacgctaggcagagcgctggatagttctataccgaagtattggactatttgttgtggttgtcaagttataatcaagtaaagtaaatagtcacgaagttacgaagtatgattgaagacgaatacataaactaaatatataagtgtctagatacatatatctgcgtttgggatagacgactagttagtggaacactagaatagttctattttgtgactgttggctaccggaaatccaggaaatagccatgccacctgctaggcacgtaatctgccaacttgctaaccagagaccaccagcacgagttcgcctgatttcccccattatccaaggagcagcccaggtagggcccaggtggccagcgcctcaaatatgacagacaagattctggcaatagcgatgtgcgtcgaactatagcctgccgacagtagccaagtgacagaactgtcaagcaaagcagataattgatcacgaagtacgcactcgcaagccgtgaaagctgtgccaagagaaatagttgacaaaggatggcgtatgcaagatggctgtatatgaagaacagcgtcggagaaacactcgcgaaatcgagatgaggccaattatcacatcttatagatgggacaatgagatctatgacctttttgtcaaacaagatgccaaggagcgccaaggagccaaggccagccatgcgggatattgagcttgtttcgaaccgtccctaatctactggatctgagcaaagggtcgaggtcaagtctacgttgatcgagctgtggcgcttgtactactctagatataattggcgtaggaggatgcatgcgattaccattatcagcagggtccatgggtgcacaaaccagccatatgggatatagaagaaaatgaaacgcccaatgtacgacagctagatatacatgaggtgaaaatggggaaataggagtcacatcgattgtgctttgccagtgcgtggaagagaaaatgggaacagacccactggccatatgagcgaaataaattagaaagtagaaactagaagttggaggctgagaggattctatccagaccccgttctctcgagcgctgcaggcgctccggggcaatacacttcggcagatgcaccaagtgcccccgctcgatccgtacgaagatcgcgtacagcagactggcaaggccaacagcaatcacactgataagggccggccacttgaactgttccggccgtgagaaaacgatcgtggagacataagagcaaatctcgaataggttctgccaagcagcttctatcgacgaaaaagagcctcgcgcctcggcttcaataccctgtaaagtcccatgaaagtcagggcctggctatatattgaaagaaggcattggcaaggccgtgaataactcacctcctgaataagaatctgtacacatagatcgaaccctcgcaagcctacccggctgagaattggatactctgaagagttacagcgatctatcatccctccctaatccatctcccccctctccctctcttccccctattcctatcatcttccttcctcttccttaaagtgtgctaaggcttatcagccaaaagaaattcctcgtcacttcgattattatgtttacaatctggatccttgaggtcactattacaatatcgggtagtgggttcttgagtatccgtggcttattagcctgacgcttctcattatctctatcatgcagacacaattgagttcccatttttttatcttactttgagttccagccaccaagcaaacttttttatcgtcagcactacgtattgcgcgtctcaattgggcctcggagggaagtaaggtgagttacgtgccttccagtgctgggagcacttggctaactccacccatctcagcagtttccctatcgaccagccatgactgtagtccatcacgacaacatggaaccttcatcagagcttattggctttgaggaagcgcctccgatcgagaatcctactatgccagttgctgatattccatggagccctccgcctattgatccattgccagaacttggggataccgagagagcaaagttgatcgacaaactaatagaaaaagcaaatgaaagtgaagcggactcaacatattgggcatgcctctggttgtccgatattgaatcccttcgagagattctccaggtggcggaatgctcccagacctctgcgtccctctccatgacaggcgcgaatactttcgccatgatcagggcttgtgagctacttccgtttttcatacccctttctaaccgacggaaggactgacattgaaactccttagggaaaacaaagccgaggatgatcgcagggctgcctgagacacaaaggaagcgaaagttaggggaggagagcccgaagcgaaagttgaccgcaaaaacagctgtgagtcgtctaatttgcatggagtgaggaatgatctatgtactaataccttgactagtgtcttaagcgcgatgatttcagctgtgtgatcaccaatttcccccaggtagatgtggctcacatctacccgctattcctgaagaaaagtcaatcatcgggaaacaataagaacaatgacacgtacgacaagttctggaaaacgctatacatgttctggggcaaagaccaagtcgatcaatgggaagcccggttgacgggcccatgtggcacagagctttgcgagaatttgctttccttgtgccccaacgcccacaggctttggggggcttgttactttgccctccagccgctccatctgcgcgatgacggtaaggagttgatcacacgcttctactggcttcccgaggtcacgcgacagaaggttcaggtccaggacaaaccgagtatttcgcttcatcctcccgcagatttactcaatcttcgtgttgagaacactgatggatccgcgctcaagatgaattctggtgatctggtcattttccaaaccaaggatccagaaaacctaccattgccttcatgggatctcctccaaatgcaatggattctccatagaatcggtgcccttagtggagcagccaacgtccctatgaagccgtgggattgcgatagtgaggatgagggttccgacatggggctcgaagatgttttcgagccttaccagggtgaactttctgcgggtacggagtctgaagatactcttgaatcttgaacccgatgaagaagatacgcagttgccgccgattcttggccgtccgtctcgtttccagtcttccttcgagatcaacccaaatgcagacttccctcgccgacgatctccctccagtgagaagtctctacagaaaatagctattcttccttccgtcccgcatgctagaagctcccaaaacatcgcaccacataaccccacagacctagtgaaatccccgggtagaagtctcttatcattggacatgactcctaggaggtttgcttgtcgagggcaaaccatagcagtcgtaggataatgcttcttcgttttttttttctttcaaatttcacttcccttatttgaaagtcccatagcagcaacattttgaaattgaatctcattctggatgatctagctatcatccacactcaaaccccaaatatagacaagacaaattcggcgctgataaggatcgacctgatgatccatagtatccatctaatcatcagatgagaagcgatcaagaagaaatttttccctttcctcactcagttcaaagccacgcgatcttatacaacatccgcattctagagtgcagtgtcccataccaagcgccccggctgaactatttgcacattgagcatcaagacaacatccacaatcacgaccacaacaaccgtttctagacttgcagtcttcaacaagaattggatgcatataccacaaaggattggatctccataactcaaattcccgttgtaagggcctggaattaccaatgatccagccacgggtataccaccaggctcgtgtcagcatccaattctcttggtagagtgtgctcgtctcgtcctcaaagcttggaacgccagtgccccagaaactcggattatggttttccttggttactggtgtctttgtgaagctgttatcttcaagcaagctaatatatatctttaaagctacaactagttcgagagataactcgaagcccacccgatgttgactgtatattccagcccgaagggctcgaatcgtgactcttggtatgcgcccacgcctgggttctttcatagcccttacgacacacggtccacgtacagcccctcccctttgtatgcggtcgataatggcaataatgcggcaagccaatcatgaccggaaaatctcgaattacttcagttttttcagtaggatgaggattgtacttacaatgaagaaccgccaacctatatctattatctcatagagtggcgggtcaaggtcaataaccgaatcgtatcgaaggataccgatgaagacctcgtgttagctctaagagactactggcagcagttcttggaaaaggaactgtatgatctccttggatgtaaagttccccgtgaccgaagggtaagaggtgaggatacttccattgttatatccgtaagggatcgttcttaccaatcgctatgacaaaaccgatattaactagacaattatcgaccggcaactccagaagtagtcagttctgttttattaggacaaggagctgacattgaagataggtaatacagcagctcagattgacgagctggcggatgcaagaactgcttctagtatttagctagttggttggcttcccgctataatatcagactacctcaaaatttgatagttgtcgtgtcctatatggaaaaggccgagctctgaaatggaggttgtcacacgagtatcctgcgccagctagcacctttctggacaaaccgatccaaagttacgggatctatggtcatcgcgcaatcggaaaaatgaaagtcgcggttgtctgggtcgcccttagcaggaaaaatggattaggtaccttttctcccgcgccccattcggattctttgattgggatgaagaagagggctttttaaatcgatggtgacttaatgatcagattatgccagtcccaacagacatataggcaagatgtcagaagagtgcgcatatttgtctgaagcagaatcatttctagaacctccggtgttttcaaggctggaggagtcaaggtcgacacaatgaaggccttcctggccgctgatctcgtggccggtgccatttcgcgatgcaggacgatattatcaacagatgaccgggaactataggagagctctgaggggcaactgcattaaggcgatatctaggcgctatcggcagcagaccctcactagtgatgaccgtaataatggaaaggtgcttccacaatcataaaaaacaagattgtcggccgccccagggcgtcctataaatcttttaacgatgctgtacttagatatgaatgaattaatccaaaagataaaggtgaccaacgtagcaaaaattcccgactccgactggtggtcatataattgcaaatctctaagggtataatgctgtttaagtgacagaaacaatcagagattctatatgacagttgattcaacgaagttaatcaaattaaatgattctagtatagctatttataatagagatgttatacctgctgtaaggaattgaaaaagtagtatatatgcttataataaaaatgctattaatttaattcctattaaaagcaaatatgtaatgaaattaattaaagcttactttaatttatatcatttacaactagaatctttattaagaaaaaatagattacgtcgtagatttagaaaaatatctacaagtagaatatttattagtgatggtgaatttaaacatactaatgataaagtaaatataacattatatgtttataataaacaaaaacttaattttttattaaaacttaaaaaaagatatttaacattatttaaaaaagctaaatttgctagaaaattaaaattaataaaaaatgtaggattaaatattttgtgtaaacatcaacaaaaaagtatattattaagtaatcttttacctaaatataatactcaagtaaatacagcacaaaatatttattattcaagatttattaaaaaaagttttaaaagattaagattctacatgtatttaaagaggtctgaatgaggttgtagagaaatgaggtggaaaggagtacggattttgatggggtatgacgggcagaactacccgtaggcggtaggaagcgattagccaataagacaacacaaaacagcccaaaggcggtctaaacaccatagtctttaacaaactcgtgcaagcccattcacccatgagtggtgagtgacatgagtgatataggtatgacccatgaattattttaaccagcatatattgaagaggtagtgatcttaatggtcataaaatcaatttccggactctctaaatctatacatatcgtctgttcgtctacagagattgatctaaatgtaagactaaaatctctgtatttacacagaagggattctgccatgccgccgcaagatcgtgttcatgtcacgcgtgtgccgatttttgtttctctgcctccacgccagtctcctcttcttcaccagatgttgtaattgcagcaggctgctacgctcggtgcccttgactaggcatcaagcttttgtgaggggattccaaccagaaactctacccctcagccacaccaaaaagattgtcgcgaccatgaagttcacgccactgaacaaggccgcaaagcggaaagagcccccatctgtctctgcaattgcaccagcaatcggagggctcgtaagggtaccaatgcctgcgatagcaagagccagcccgattcgaaacccgatctcctgaggtgggtagagagtcatcacaaggggcggtgttaagccaatggtggtgccagatccgataccaaacaaagcggcgaagacaatgttggccgcgttactgcgaccaggcaaccacaaggccagagtgatgacaccagtgaaaaggagcatgatgataagcacattgaaacggccgtacttgtcggcaaggccattgggaatcgtacgtccaaaaatgctcgctccgttcatgatgggaatcagattgtaggccatagtcattgacattccgttatgcatagcagacaggacaaggtagtcgaaagggacaaacaatccccctaaaccctggttagctgtgttgcgatgaaacataatgataggcggctcacagtaaaggaaaaagcagaacgtcaacaagatcaagaagttgaattccgtgaaaggccgaaggtagttcgcaaggttgaactccttgcgagtgtgaggcaagttggaggatatggtgagcatggcaatagcccagagcccaaggatcaagaaagcgcagattcgcatcgtccatgcaaagccgacctccgaaaggaggttgttgaccataaggggaaatattacaccacccagactcgagcctgcaacggtcaatcctcctgccaaagcgcggcgctttctgaagtaagtcataggctgcgaagcttgtcaaagaatgcgcgataagttccaagagtgatcacacaaaccgaagtcattgccggagtgaaaatgagcgatgtgccgattcccgagcaaatcgactgtgccaagtagaattggtagtatttgcttgacaagctggtcatcatgaggccaaacacatgcatcaatccaccgatacagatcggcaatcgtggtccatagttgtcgaatagatatccagacaacggtgacatgaacagcatgaagaaaactagattgaaatgagcttgttgtttcacggccggttggggaagaaggctctcacattcggacgaagtgatccaggacacctccgagctgctataggttttcaactggttggtctgatatccagcttggaacagagcaatgcaattgacccatccaaatgagatgaaaagacccaaggagcctccgagtagcgataagaaggcatttatgcctccttcaggtgctgctggtggggcaggtgcttgaggcttgggctccgctggactcgatggtctcgaagaggttggactgcccttttcgagctcagcggtacggtcgtcgtgcatagttgctgtggggtgcttgatagggcgcgcaaaagatagttgtgcttgtgatgtcgattggaataacgagtccgattctaaagaatatggccagtactatatacctctggcacgaggccaagttctgcgtatgaaaggaggtcggatatacatgctgtagctagcaatgcccgatttcgagtaaaagatcggacgtccgatgttgttcgttggtgatatacgcaaaggcgctgctgcacacccgaggccgagtccgcggccgagctattcaaaaggaaagccgaccccggtcggcctcggagttccggactcggcttggatgtttttacctataaacattcgtcgtccacctgcgaggttttaaggaatcattcaacaacaaatcatggactatcctcctcgccgattcagtcgatttcatgccagacaagtctttgctcgagccaactttccgctgcgagcatacggacccagaagagggatggcgcttctcaagatcggtctgttcggcactgttggctacttcgtcgcgaagaagcttcttcggtaagtcggtactcccaagacactatggtcaagtcgagaattatcaactgacgtctatcagagactcgaatgagccacgtcaaaaccctcaacaatgtgcatcatgcggacatgagcgacagcaagaatccaggcagcaaccgacgaacgttcgacggacgccataccattagcattttgcagttatcagccatgatgccagtcagcctcaacaatcagctatttcccaggttcagtagtcaacagacatacttcgacggctcgggcggtggtgacggaagcaatggatataagacgttggggtgggcttcgacttactcaagattctataaggcaaattgggactgttaggtatcgttgacaacctattgttctggcgctttcttttcatagaagatagaggaagagagtactctaatgactatttttatcttaccgcctaacgaagatattcaactttgaagattgtcgtccttatggtccgaaattcccaaataatattagcgtatatccatgcggtcgaaagctctcagacaggtcagtgttgtagtcgaaaattctcagattagactctatataactagggaattcagggtaaatagtgtcgctagggccgattttggcatacctttcttcccacgggccctacaaccaataacggctctgtcggcggcgccataatcacgcaagacggaaaggagacctggacagtccacgattatttaggctctgactacaatgcagccgatgtaaccgtcgagaagacagtcgcccagttccttggcggtatgggctcacccaacgcgatttctattgatgaagtaactgcaacctccatcttcacgccgacagtagttctcgccgaaacgtggagcggaaatcatcagcgcgtcttccttgccggagatgcttgtcatcagacaattcctttgggcggctacggaatgaatatgggccttgctgatgcttgggatcttggctggaagctcccagccactattcaaggctggggtggcactcacttgatgaagacatacgaacaggaacgtcgtcctatggcagcgctgatgcaacactggcgcaaaatccacatgatgaaaattatggggctttcaacagctgtaaaattggatccggtcgtcatcgaatccatggatgagcgcggcatagccctgcgtgaggaaatcaatcagtacattcagcaaaacgatgaccataatcagagcttcggcgttgaaatcagacagcactacgagtcgagtctggcagtactgagcgagcaggtagatgttgaaaaggcagcatcacagttcgactcacgcaactacatcccaactacctttcctggttcgcgggtaccgcatgtggctttgtctgacggcagcgccatttccgatagattcgggaaaggcttcaccatggtcgcttttctgcagaaagaagcagtagcagccggagaccaatttcaggtgcccatcgcactggccagttttgaagaagcagcacggcagcacagtattcctttaacgagcctttgtttgatgaatgagactcatgcgttccgaatttgggatgcttgtcttctcctcgtgcggcctgatggattttcagcgtggcgctcagatagtctggacaaagtgcacaatgcatcacaagtgttgcttcaagcaacagctcatacctcacctttgtaagcaaacccctccgagacagacgatcggacatagaacagaatagaaagaattaacctcaattaatcacgatcttcatttcgcaacgtaaatcgtcctgtggacttgctctatcaaatagttggaaccaaaaaggccgaaaagtccaagtagtcggagtcctgacttcagtcagtagtgctatgtaagaggcgcatatttggtaatttgtactcaccattgcgccaaaatccaggccgttaagaagcccattatcgatcacgtcttgcgacacttctcggggagtgttggcggccctgtaggactgtagtacatcgtaacactccttcatgctgtcttttgcagtgttcagcacagcagacaaaatgggttggccgcgttccatggcgtgtatctgggaaagaatgccagcaagaaagatgtagcgtttcaacgtaggatggcccaactttacgatctgcagtaattgttcgttgatgtgttccaaaagtcggatgatgggcgctcgctggccgcgcgccagttcagcaagaggatcaaggaccaatgtgtagttgagaccaatcgaagcagataacggaccaaaacccgtttcctccagctgagacacaacctccaagcccaagactgaaattacgtccaggctcaaaggtccgcgaaatgaccctgtgctcatcaccatcaacttggaaagatcgtcaagagagtctgtaggtagccgaagttgctcggcataagtggcgataatcattgcagactcctgacaaaccctccgggaaaaatagaagcggggatccttttgcgcttgtagcatgaaaggccgatgcagaaccagaatataccgacgaatctgcatatcaaggaaagcgtgatgcatacttaggaattgcgaccaatgcgatcgacaatagcttgcaagagtacggcaaactgtctgaagtttcgtagctagctcaatggccatttcgtatgagtgctctaatcgctcgttttggaccgccctgacaacttcaagtcgtatcggcagggactgacgcatgagaatttgtatagacgattccgtatagcttgtcaacggttctggagatggagactctttgctggctgaatttaaatcagcatcgctgacattaagaggcatatgatcgtcaaaatcgtttgaagaaagaagcaaagggatggaactgtccatggaaccatggattacgagctctaggactgttgtccaaagcctgcttcgtatcccggcttgaaaaggagacagagaaaacagttgtggatctcgatgcaggcccatagccatagccacccgaagtagaccactttccgacagccacggtgaacggccgactaatgttatctgccgcgaaaccaatagaagacagaaaatttgaattccatcaagattgttggtagttttctctgacggtccaaccatccagtattgagcagcttgtatccaagtacgccgcgagcgctgtagaactttgtcgtcgtcgttgctgaagacgcttccaatggccaacaccaaacccaacttgattgcaaagtttgtaactacaggctgcggctggctgaagtattgttcgtattctgcccagaatgtgggaatgtgaaaacaacgatagatcaactcgaaagtccgcatgtagtgattcactagtcggtcacagatggaacgagccggcattgtactcaaaagttgaggaacggggtcatccatctgcggtgcctgctcatttttcatcgtgagtcgcaagttgcgtatctcattcacagaatcggccagctcggccttggtatccacgaaggtcaattcaacgtcactgtctccaacatggctgactctgaactattgacacatcagccaatgttcaactagtcaaggtgttcattagaaaggtgcttcaacgataccttctcagcattgtgcagccagtggcttgaaggaaatagttttaccttcttctggttgtgacgaagtcgagggatgacagacggaattgttagagacttatcgcccgtgacagctgaaggcgcaggacgagcttgggagagctcagcaagccgctgctcgacgtgttgaaggcgatcagacaatgccagcagcgtgagatgattgttgctgctgctgctgctgctgctgctgctgctgctgaggctgtgctgctggggatcgacttctggtacaaccgagtgctcaagctgctgtacacgtcgctctacgctccgaattcgctcagattcattcgttgttcgttgcctctttgcagggtgatcgatgttgttatttggggcaatgctgagtgagcgagaaacttgttgttggacagtattgccctcgcttccacggtcttccagggcgagactgggttgctgctgatctccttgatatgtgcacgtcaccgattttctggagacttgacaggctgaacatggcgatttaagatcgcaacgtacttttcggcggcggcacgggtcgcaggattgcacaggtcggcggctccgacgagcgggtgaagatgctaaccgggtactgccaaagctctggtcctcagccatcttgacgacagtccaaattgcaggtattgaatgcgcggtcaacggacatcaatgatgttggaaaggtcagagggaaagctcggggtcggcaagctgctgaagtgaggcgctgtacgggcgactaagtgccatcggaatataaccccctcatcggataatattgccaagcagtattttagatccgcccccagctgtgtaatcaggctctcccacttctgtgtctactctctcattctctctttttctctctttttacaactactcgaacggagtacggagtacggagtacgtcggaaactaactattagtaatattgaagcctagacatgcatcattatacccgaataccatgcctgaatatttgccggtaggaaatgaaaggacaatgcgctagtcctaatctagttaaatttaaattcattctataattgcttcgcttagctccgcaataattgaaaattaatgcttcatgactatttagttaaataactagttaatctatttatacttgaattatgaagtatactactctgaaagcttaccggatccgtcaatatgaagctattcggagatacaccaataacgaagacttccaatttcaaaactgtatttaaatgctggatagtagacagcattgaattaaatgaatgcgccaggtaactaattattgcggagcgaagcgaagcaattaaatcataacctcgtgtatgtatatcacgtgatcaggtatttttatcctatgggctccaaaatcattgaaactatgtcacgtgaagtattgtcggctaactttggcagaataaatagactaggcctaacggacatgtcccgagggtccatgcctggagaatgaacgaaccatcattatcttccccagagcttctacagtcacactttacgtagcattagaagttagaatcagtcattttgctctgaaacgactatccggcggccgcaggccgtccagatccctcgtaattatggtgtagaaattggtacggagcactccatatagatgaagctattcagagatcactatagagtacataatgcaaatggcttccaccaccactaccaataatagagatattccaattctgaaaattgcatttaaatgctaagtagtggtaagtattgaatttataaagtgtgtctggtaattaatcatagtcatggtgtaattgtacgaaggaggatgaataacagagctctcgacacaaatcctggaattgggcgaaagcgaagggcctgctctgagaaggcggtggttgatgacggtgagctattgtccaatgagagagctatgttccgatggcacacttagtcgcccgtagtgctgtcccatcttgctctcggactcggagctcggacataaagcccactcctctaaacgttcgccacccaccgaccaattcaacctcctcagtacaggtattttcatacagccctagtcgtccccgtcaagggcgttgacacctttgtctgcgaacgggtggaaagctttcgtactgcgtcggagaggactgatgccaaaatccttccagttgatgttccaacgaaaagctgattcattgctccacacaaggcatcgcgcctatatctttgcatgaagtgactacctgggcaagtgatttgctcgtaaaagttatatgaccgtggacctaggctgacaatcagttctgttgagttacaaggttgaaagcaagtaatacagcatataaatgatccactagatactaacggcagggagcaaatgtttgtatgcaataatggatgattggaattgcctaattctaggagtatatctgggcatgttgaagctttggataggtagtatagagttttcacgcagtggatcgctatataaacccaccaataaacgtatatcgattttcctgtactaaggacgggccaaacttcgaggtaaagaatggacgcatttactatgaaggcaaggcaattgaaattagggctaattgccatgaactatgagttcagcagtctcagcgaattcgcctaaaacaattatcgtacgcgtagatgaaagagaatttgtgattacatattttggatctttgatagaattcaaagtggttatggattagtaccgatatgttctatggagtttacaaaacgcgcgaaaatgacagttctttattcagctatgttagcgagccatccgtttcggaggaacttatgcattcttggccggttgggcagcatccaacattcaaaagacccatgagcgtactttgtcgcagactactcattcattgcctttgcctcttcgttttttttttggatcgtaggagacgtgtctatcacctcgtttaaaacttaagagagtaaagcatctagaatactggatatttatgcatttgtatgtacctgaatagccgcaattatgaacttggagggcttagcatagtaaaccactaagaaaacaggcgatacatgcatttctacggtagaaatagcatcatattgacgtactgatcatttataatacgccataaagagcggtgtggtaggctaccataggcggaaccatttcaggcactcgggcactaaactacttcccaaagggggcttacagggggttgggaccctggcactcataccgcttcgtagtgcggtccctacaaacttggtagatccagggacgtagagaaccagagattttatatcagatgagactggcagtatcgcactatctttgatagtggtgatgggtttatcaactccccatcttgagaaacgagaagtgaaggctcagccaatgatgatttcgacgatttttcccgcggcaaacacgcaatctttgccgtcccagtcggtcaagggcggagcggcatagcagtacagtatcctccccggcctgaatatttcacatccttcgtgaaaaaaaccagatgaacacaagcccaggccccgaaatgatcggctccggacttctgagtagtgagctggtagatcgagaagaaggagggcgtctatagacacggagtctcgatttggctcataatcatgcaccttgaaatcaatcacttgatcagcctccatgtcaacaacagaaccatgagtgtcagattgcgtcgatccggagtcctttgaccactggtaaacccaatatctaccgcggacaccctgatcggtgatcaggacatcccggccccagtgcatcggctcctggagtttctgtcccagcatggctcgcggaagacatctgaatccaggagttgacaacttggggtattccagcagaaccacgtccttgggaacagtgccaagttgcagccagaaattcttcactcgatcctcgccggacatgtgaacaagctgggagacgtcgactccgagaagaggagcaatcgcaagcagttcgtcttccggcctcgaggaatcgcgtaggcacagcatctgagagacctgtttcatgcgaaactccacgttcgtaagggagggaagactccggaactctcgcagcataagtgtctcgatgctgttggagggtcgcgtgcggcagctctgatctaaccgctggacctcgtcaaaagagagccctgtcaattgcgacaggccatgaagcctttcatcgtcaattggttcgtctgttccgtctagtacatcccgaaaaagtgatgaaacctccgcgagacctgcaggaaacaagatatacaggctttttgatagaatggcttcttgcaaggtccacaagcgccgtgaccaggcacaggtcataagccgaaacataatcgagaacccagtcaggttttccggagtgctatacaagccattgtccagtacgatagtcatcgaagcttcagaatacacctgtctcatcttggtaatggccattttccgcacccgtgaatccgctggaatacataacgcatcgatccagaggtaccatggcacctgagcggattcaggatgcaaagagctctgcgctgaggcacaggcgagaccagcgagatgctgaatctggcaccctggaaggcccgtttccgaggttcccatcagaccgtcggaccagacatgggagatggcagcgaatttcattccttcctgatatttgctcaccgcgctatatctcatgtgatccctctgtgagtcggaaataccgggcatgagagctaactgtaaacgtcgcatatcaatcaccggaaagctaccaccgtcgaccgcggcaataatttgatggagacccggggccacactttcacacttacagtccggctggcgatgcttggccttcgcggtatccacatccaagttgtggcctatgcacctctcttccgaacacgcctcgtgtctctcagtcggcccgtctgtggcagggaagatgcaagcatattcgagaaggtgtaaacttccggatattgagccgaaggtattatacatggatggacaccatccttgactcagcaatcgaccgcgcagctgctcctccatgcctggtgttcgcatagacatgagggtttgcatcggcctcctctcatacagcactgggggcgcgatagaaatcatatgctcgagcaaaagcagcgatccccgaactatatggtcaagcgcagtttccgtgctttcgggaagagacacttcgccggataaactgctttttgccagcgctcccagtccaaacaggacggcttccgctttcacacgcgtgtcgtcccactgatcttgccactgtgaaattggccatccgaccccactcagccgcaactcccaggagactttcagacccctgagaatcttcgtgtcaatgacctttccttgaggagtatccctcagactcgctgagaaggaatcgaacaaagcagattcaatcacaccgaagaacaaccaggcctgaaccatgggtagtgcttcgtctggatcggagaggatccatttgataacattccgcgccggcagacagttgcgtacctcaaggtactccctgaatggaaccacagggtatctttgagccgagtcatgatttccgccaaaccaagggatatactgcattgcatccccgtattgctgcctctcctgttgggtcaggaaatagtccatagtaagatatttgtgatgtagcgaacagtgccttgcgtattgacaggatggcaccgctcccgatgttctagtttgaagctgtaagagtgcagttccgaataggacgagctttggttgattggacggcctatgaatgatgagtgaatagaactcatcgtaagtcctttttgtaacgcttaaatatgtatgtctctgggtacgctttttggatcgaaatccctgaaagtttacagtatgtaacagccaaatcagcatagaacaagtcgagatttctgatctaattggggcaccatgtcaacaaagttacaataccaatattttaataccggctgcagcatcggcttggagttagtcaacgagggtattgggcatcgctgccaactcattcctcttgaggctgaaagtgcggggtttcgcccgtttcaccacaacacccgggtatttccaccaccttcttctacgtaagtggatattttatagtcaatggccgcagatcaccacccaggcccaatatccttggaatccgggtggatattgtaaccccaaactttcagtagtgggggcagtcagaaacttggagctagggttatgtatgaggcgtgcatttgtgcccagcgatcaaggtcggctgtgccccccagtcagcgtcgttctaaaggctcgttgtgcagtctcacagcccctcgacttctcggtgggaagcaaaatccatggatataaagagcgatgcgccattaaatatctacattccttttgcaggtgattttttctaccaacatcgtctctcgacacttggtcaaaactttcccataaccagatgcccgtcacccttaccacggcggcccattgcccccgcaaatgggaaaccccgaaggtatccactgctgaagagctattcaaacgctcatgtccgaaggaccatgagcgcagccggaaattgatacagagttcgtttcagccaagtctttttcgcacgtctcatgtctctgcctctcgacatggcttcgtctgggccgtgtttctagcctacagcgatcaccataacctgataatacggcccgaagatgtgtggttctccattctgacacaactcagtttctttgtgaacgcacatgcagaggagctgcgatcttttttcgtttcacacgagggacaaaaagctcttgaagtcattgaagtgggaactatccactccgctgactttggtgcgttggccttacgaatgaccaggctgattgagaaaagtgtggtggacgaggagttacgaacctggatcatgccagactttagcacctcaacagaatccgacaatgtggtcgcagctattttgatgatgggcgctctacagaagtacttttcgttcaaagtttcattgacatgcggaattccgtctgtcacattgttaggcgagcgaaaggactgggaaaatattgtgaagaaacttgagaggctatatcagctaggggacgagcctgcacggtttgctcagcttcttcggccgatcctgaatcatttcgttgcttcttttgacactccaaactcacctgatgtactgagtttctggagcagatgtgcccacaaggactctatgggcagtggaccagactatttatgtggctggatttcagctttctgtttctggggtgaagatggaaagttattatgcgcggaatccatccattcctcctcctccccaaatttccagacacagaacactgaatgggggttggatgctgttttgtcacgtcgcatcgatacagatgatgtcccgtctggtttcgcctccgtgccggttactatcgacgacaatggggtagtttatgacgctgtgatgttagctggactgatcggtgtccaagccacatctagcggagcgatgttggatggtactagagatcacaacgacagtggtgtgtttcaatacaacgcaagcggccagctggaaccgattgtttatagcatttctcctccgactgaggaagctgcacttgactccatacagccgttgtcaggatggtggatccatgaaaagaagcgtgcgaaggagacagaagaccgcgccgtggaaaaaaagggattgcgaaccacagaccgggctctcggggccttcggcgcagtagctcttcggaaattgacttggattgggaattcgaaaaggtccccggacttgaagaacttagcattctgatctaagcgatgaagtctgacagcgtgaggaataagcttatgaggtatagtcatttatttggtgggagagtctccagtacggttctctcttcacaatcaaggcttcaacaccggaatagaatagaattgagaatttcgtcaaatgagtgattaccatggtagactcaggccaaataaaatagtacttacaagtgaagccacccggggcgtgatgccttacgtgcgatgcgcttattgagagccctctagaaatctttacagacggctggggtttaaagaataccaccaatggtcctactggtgtgaatctttatgaactattcacgcactgttccaatgtgcactttggatactctgcgtacaagtatgctccttagatattccttctcatataacccaagagccactgagcgcagcttctccaatcaaacttggagcggtgctgatttgaatcgaattctcgctgctatgaagttgccaaacaccgggcagatattcctgatatgcattgggaactagagagttttattgaatgatgttgttcttgtcaacgttctctgagatggaagagctgctttggtgctagcactcctctgagatggacgtaatggagccttgttggccttgggcggaaaggaagaacgtttgaagggatcgacagcctgtttttaccacgtggggacatgcctgaaaagaactgtgataggaaccaatctagagggatgaatattcgaagggaacagacaaggtttcaccaagcggtgtcggcaggaaaagcatattactgcagctgcatccatattagctagcgtcgtcagatacgctcagacccatagaactttggaagccgacaggataagtttaccatccgcaccctgctggatttattggttgctgctccattccagagctttcgacatgggacattgacaagttgacagttctctgactggtaaagatatactgtaatcaagccttgaaaccttggaacatgtatagacttccatggatctaggtagccatgtggacgagtcactaaacacctttttcaaagttcaatgcccttatctagtcctataactgcgctgagcaaacctgctgacgaattagggctgagacaatctgattagtctattaaactaagtaatccgatccggttgaactcggttctaaattgagctaagcgctattagctagggtctataaggctctcgcacggagtgctgggccgaaacagatttgcagtcccgctgcatagggatgattctcctgaaagggtgtaaagcgaatgcgcctgtatgcgcgtaggttaataatataaaatatattgataaaccatctacaaactatagaccagccgatagacatcgtaggtgtgagcctttaggctagcgtcatactaaatgaaactgttgtctcatttcgagcggcatggtcggggctagggggaaacagggccggatgaaaggcagctcggattgcaatcgcaggatcgcagaagaggcaaagagtcacacgggaaacagggggtggcggagcttaggagctcagtgatccgggtcaatggcgaaaatgcctcaactgcgaggggtaggagaaagaaggcgaaaaagaaaattggggctgttggatggagagggggagagcatggggactatatagaaccacgcacggggaggcataaggacaaagagcgctaaacctaaggggtcgaaactaaacctaagagagtaattcgcagtcctcatccgatatggtgtagtggctaacatcgccgtctctcacacggcagccgggggttcgattccccctatcggagtttcttttttgattcttttcttttttttccttgtctttatatcctagaaatgttagaaatgaaaacagttggtggaattggcatctcgttccaatcatttttggttcgaacaagaaactatatcagagtgccaaggcatattaacaaaacaaaacagagtaaaatacactcatacttgtcagatatatatcaaccatcaaccgagtgaatccagatatatttactccgtggagcaacttgcttcagtcgcatgatttgcgatgatctgcgcgtagaccgagattgttggaatatttaatccctagcagtcgaggatgttccttcggttgttgtggccgagaacaagggtctgaaggaaatgcgagaactgttcttgaagactcaatggtttggagacatggagcggaaatgtacaaagacaaagaacataaatccatacatagacgcatacgtaaacgtatttccgagtgatctctacttacttgcttgggtggacaataaggtctgcgagtaggactgggcctgggacaaatatcgggctagacgcaataaattccaccacataagtgcacattactatagtcaattgcaacggtcctttcgagctgtgcagcatgtgtatttcacgaaaacaagaagaagattacatggatgatgtgttttgctagccgagctagtctaggttagctaaaagtggtacatggtgataggatatatgagatctgaagatttagaagtgaatggccttagagtaggtggccatggcagcctccttgaaggcttcggagagagtggggtgggcgtggcaagtgcgggcaatgtcctcggaggaagcaccgtactcgatggcgagggtggcctcagcaatcatctcaccggcaccggggccgatgatgtggacaccgagaatgcggtcggtctcggcatcggcgatgaacttaacaagaccctcggtgtcgaggttggtcttggcgcgggagttggcgctgaaggggaaggtaccgacattgtacttgacaccggaagccttaatctcagcctcagtctggccaacccaagcgacctcggggtgggtgtacatgacgctggggatggcagcgtagttgacgtggccgtagccggtcttgatatattcgatggcggcaacggcctcctcctcggccttgtgggccagcatgggaccgaaggtgcagtcaccaatgacacggacgtggggaagcttcgtgcggtactcctggtcgataatcaggcggccacgctcatccttctcgattccaacctgctccaagttcaggccatcggtgtagggacgacggccaatagcgaccaggacaacgtcggcgtccaatgtctcctccttgccacccttggcagcctcaactttgagggaaatagtagaaccactgtcatcgccggacatgaccttggtgttggtcttgaatttaataccctgcttgccaaggatcttctgggcctgcttggagatctcggcgtccatgccggggccaccgatctggccgaggaactcaacaacagtgacctcagcgccgagacgggaccatacggaagcctataccacaatgttagcacgatctagcattcgaaactcattccgtagttaatacataccatctcaagaccgatgataccaccgccgatgacggtcatcttcttggggacctcggcgagagccaaagcaccagtgcttgagacaatgcgcttctcatcaatgttcaaaccggggaagccggtggcttcagagccggtggcgatgatgatgttcttagcacgcagggtcttctcaccaccgtcgttgaggacgaccttaacagtgttggcatcaacaaaagaaccggtacccttgatgtactcggcgccgttcttcttcagcaggaactcaacacccttagtcaggccttcaacagctgtgtccttggccttcatcatctgggtaaggttgagcttgacatcgccaacgtcaataccacgcttcttggtatcgtgaaggacctggtggtagagatgggagttgttgaggagagacttagaagggatacagccgacgttcaaacaggtaccgccgagtgttccgcgcttctcgatacatgcggtctgccagggtgttcagttagtatgcggattgcgacggcaagaccgacctaatcaaaaattggaaagcctagggagaagtggttcttaccttgagaccctcttgaccggccttgatagcagcaacgtaaccggcgacaccaccaccgatgatgaccaggtcgtgatctattgctcgggaaagcggatatcagcaatcgcgtccggcaagaaaacagaacctctccgggtactccgggaactccgtgatggcgatgtgagcatcgacttacctgcttcagaagcgaaaccacgttttgagtggccaatgaagatcatgggagtaacgaaattgttgggaatagccctggagccggcatggcggaaggcagaccggggcgaagcccggggcaagacggcgcggaacataacgaaaagaagggacgaaaagattagtagtctttagatataaatgcaatcctcgatgtaggcggattggagttgttgggagtgcgcaaatagggtggtggtttagagcacgggaaatgactgagcttttgcggtattgcttggcctcaccgcctactacggaccatgccgcaaagctggcccgtattaccaaggcggtaagacgggccggcaccttgacggatgatctcgggatccgttcccgatgattctgcgggcagaatatctgacataggaatcgcccagacattttgattgaacttaatacgatgctaggagaaaggaacattcggtaggacctgcaacagtcgtcaagtcttctttgaatgacaaaaccccaggtattggtggtttgactcgggtcatggtaccgtctccttctgtccgccctggagaggactactccggggaacgcaatttgataagccactccctaagggctgaaagagttagcggcgattccccagagattcttttgcctacccgcggatcattctatcggcaagcagtctcggcgggctccgccgcaattataagcgcacacgaatccaatggattgtccgtaacgcagaccataactcttcgcacgggttgagaattgtgttctgacgttgatccctttatgcgagaacccacatttcaagagatgcgggtcccaattgaaccgggtaccgtgatataaaatgaagttctccagtgcttcttggcgctctttccaaccagcccttaatttttcacgacttgttttctatatccttgcagtttacaatacccatccatgcgctggtaaggtgctggaagagaaatggcacatcccggagaataaccatcctcaacaatgggtattcgtacatggcaataagaagccatggaaagagacattcagactgatacaaagctacatggcatagacaatgaaagcttctcgattgaagcgaaaattatacaccgttaatttgtaagtaagcgaggaattgagaaacaaagttcaaaaccatatcccaggtgtatcctctcgaccgattcgtgggttcatgagctcgtgcaacatatcaagacagatttagtcctgtccacaagacgatttctcctcctcctttcgatttctcttctgtcgccacttgattccactagccgccactatccacaagcaaggagaaacagcaatagagatcaaagcaagtgtggtgtacgcccagccctcgcccatggcagagcgcatagggctgattgctgctgacgccgcggcacccagctcacaccggaatagattgttcgctgcagtcgcggccgccgacttgcccggccagagatcgaccatcaaggcattcagcacttgggaggtaccaatgatcgaccatccggtaatgaacaaaagaatgataggagcggcaaggttgaccttgtgacccagcacccagccgtaggtcagcatcgacacattgctaatatagtaaagcgggagtgcgacttccagtctcgcgcgctcgatgttgaagttgcgaatgtccgcacgcacattcttgacgatggtgagaccagcacgttttgcatggcggcggtagttccagtcgaccagtcggccggttgtgaaggctgaaagcacccctcctccgccgatggggaggtacatcaatgcagcatggaggtcgttgaagtgatagatcttgtggaaggaagtcgacgcaccggtcatgacagcatagaaaccagcaaacatcaatcctgtggtgatcaggaccactgacgtctcgatatccaggacaaccttcatagtcgggactggtgacgggaatcgaagggagtagttcttccgcacctcagcttccttgtccgggtcaggcaagagacccttctgtctgcgcgtgcgatgccggataatatctgccacagagttactcaaagggggcggtgggatggacccgtctccaacgacctttcgacaagtttccggtaggaatagaccgaggatgaggaagaacacgccaccgaagatgagcagaaaccagaagatccagtgccagttagtatattgactgagaaggccgccaatgatgggcgacaaagaaggacctaacatgcttccgactgaagcaaaggcgatatatgagcctcgctccgcggatgtgatcatgtctgcgaccaaaccgttcgccagggccacagtcccgctgctccctgcactctggagacatctgaggaccagcagggcagcatagctgttttggagacctagtcccaggttggctgcaaggtaaattgtgaagcaaatgatataagcgggacgacggccggcagtatccgagaatcctgcgatcaacataggtgccactccctgcataatctagagataaagtttatcagttgtgggtctctttaacaagattatatttcgtcgacttaccaggtaagtagtgactgtcaggttcacctgtgagacggagatattcagggaattcgcgatagtagtcaaggcaggcagatatatgctggaagacaagggtgagaagaaactggccaaggatcccatggcaacaatggcccgcttctgggctactgtgaactgggaatatccttccaggcgcgtgtctccatgctgggttgacggatcgggtgttttggtctcaacctcgtcaccgcgctcttgcgccatgttgcctttgtccatttgattcatgaggtcggggatttaactgaccatgtggtagaaccgtggaagatgcgtttgatgaaatatcccgatagttttgatacttgcccggtgcagggaagtcaaccaattagagtttgtcgtcaatcccgggaccggcatcgacctgaactcagccttatatcaggtgccttgctcttgccactatttagttcatgcaaccatatgtacaaccgtccttgtgttcatagatgccaggaacgacttgcttgcgataagtattcttttcttctttcttatggccttgaattttatatttactcaaacattctcgtgtagattagagactcgagtgttcaaagtacttgtacatatcgatcgcaatactatatctcgaagacaacatgacgatgcttgtgctcatggtcatatatacttcagctataggtcagcatgtactttcgagctatcatcattggaatagactcacaccggagcattagaagtataaatgatgtcatctctcatcacaaagacattgtttgcggagaagaatgacatcttggcaaatcaagatttgcggagacaaagcgattccggggccgcggagttggcttccgcgcaaactttccgctttctagaaaggaagaaccgagacaacggctgtgtacaaggatagacgaatctcggaagcaatcgaatcacacccggttatatggatgcacaaacagctgagtccccggacttcagcttttccgtattctcttttccttcttgagctccggtgcgatagttcgatttagttattgttcgtgaatcgcgattcaatacacagacacgaacttaaccaacgatgttgcaatactcctccccgagaagtacatatctattcccaaatgaggttcctaatgggaggcaggaacaagatgctactataacagactcgttagaagttgcagttggattcgtcttaattggctataacaatgtgttttgtgttgtagtcgagaacagtcaattctctttttccacgattctcccttattacggcagccatcggcattggagcccttctctcggtggttcctgtgtgcctcatacttccagaccaaagtgtacgatagcaccgacttctttgctcggttcaatctcacattttctagtgctttttctcaagtatatgggcgccgaaactgttagcaacgccgcagtctccaagtacgcggattggatcagggtccttcctaatgaccgttttcatcggtttttccattgccgacattgctggctggcctagctcagttgagtggatgcgatatctgctataaaatggatgttccgggtccgagccgacagcaaattagctagctgggttgttatcaggccaccacggccaagaactacggcgctgcctccaacactaacagagtcggcatttatgtcatataagcaagcctttctacaaattttctacttatttccccacaccgccggggctaggcggtgattaataccggcgttgcggacctggatgtggcgaaagccggccgtcccttcgctcactccgagggcaatacctgcaacattgccgaggggttcaaaagcaattgtatttttttttaacatcagtttcttcggaggctgtgagttctatctaaattacagtgaaagcgcattcactaacttctacagaagcttctagataattctcaaagggtgagacctgcgccagtctggccgacggtctggccgacggccgcaacgattgggtcaggtacaacccagatgcctttaaaaatgcttactggctggtgaaccgggccaagatctattcccgaacaactaaaccttggaacccgaggccggactgaataccgagctgaactatcatactttaccatgtgcctaacaaaagttgtatatacgtatgcttagggatctaggaaatgggacaagatatgagaacttctgacatcattcctccgcattttcggtctaatccccgtgaatgctagtacaaggtcgtcagggagaccaatctatataagtggacctggccgagcgccaaaacacgctaatcccgatttaggcaaaccggggactgatggatctctcgtacaactgttgtagatgacatccaatcataggcgagcctcccacgccaccaaagccaaaatcccagactggactgagaaatactctgagcgcccaaaagcggcatgccaggaccatccccgccgacccactcgagggaaaatgcggaggtcacagaaagccgtggcatcggataattgttcagagcggataatttcccaacttccttcacggactatgtagcgcccatcggttcgtactttcctttccggaccgagtctagcccgagcccaacgcaaacttaccgggacgtacagaagaacaatggctttcttcggattgccgatgtcagtacaacatcaatcgggtaaaagcccccagacttcgccccgccatggcagtcgtaccacacgcggtaggtactggccgagcccgcattctggccctgaaccccggttttcgcacgctggtggggggaggcccatgttgtatcggcgctggtgactggtttgctatctcgcgttccccatgttccaccggaatataaccgaattcgaaatgacactccttgcttttcagggctgcttttcggtcgatcccggggaggaggtgttgggcatcatcgtctattggtgattcggagtagtgccgtctatgtgaccaggaagtacgggatgcatgcaaaagctttaaaaacctcgggggatcgtctcttttttttttctctccgcacttttgatctcattttaccccacgggcaagggtctgcttatcttttctgctctttgttcctatctcggtctatacaactgtatctttaatgcgacaaaccttgaacactcgattcatccctctcgactgcgttcaaaatgtgtgacaaaatcccctcgtggaatgtcgtccatagactggagaagcgccagcttctcatcgggatcaactgcgtggctgctctgtctattttgttcttcggatacgaccaaggaatgatggccggtgtcaacaacgcaaaggattatattgatctcatgggattcggtcatacggagatagtggacggcgaggtcaccccggtggtcacgaattccctgctgcaaggtggcattgtgtctgtctactatttgggaacgctttttggcgcattgttcggtggctggctcggagaccggacgggaagaatcaagaccattgcagctggttctctatgggctatcctgggcgcagctctacagtgttcggcacagaaccataattggatgatttgcggtaagggaaatagggttcagtagatgcagacttggactaactttcgcagcgcgtttcgtcaatggtattggaaccggcattttgaatgctatcgttcctgtctgggctaccgagacggctgaacatacttcgcgcggacaattcattgctattgaattcacattgaatattttcggtgttgtcctggcttattggttggagttgtacgtaaatccctccgtttatgcgatgtctttctaatatccgatagtggcctgtctttcattgacaacggagagtcagccttccgctggagattccccatcgcattccagatcatcttcctcctaggtctctttggggctgtctggttcttccccgagtcacctcgatggctcgtcaaggtcggccgggaggaagaggctcgctacattctccagcgtctacgtggatctagcggagaggacctcctccgagcagaagccgagttccaggacatccaaagcatcgcagagctggagcggacaatgaatcatggcgactcatatctgtctatgcttgttgggtacaaatcgggagacctccacatcggccgtcgtgtacagttggtcatttggctacaggtcatgcaggaatgggttggtatcgcaggagttactgtctacgcaccgaccatctttggcatttccgggtttgattcgatgaagagtcaatggattagtggactgaacaatattttctacatggtatgtttcaaggttgagacaagactgagttgtgctaatgcgcatgtctagtttgctacgctaatctgtgtctttactcttgaccgcatcggtcgtcggtggactttgtattggggcgcggctgtccagggtattgccatgttccttgcgggtggattttcccgtctcgctatcgacaacaaggcagctggtgatatgggcaaggcatcctcgtatggtgctgccgcggcttcgatgattttcatctttacctctgcattcggagcttcgtggctcacagtcccttggtaggaaaccatcctgtgacctttttattcaatactaactcctgatccatagggtctacccggctgaaatcttccccctggccgttcgtgcacgtggaaacgcctttggagttgtcggatggagtattggaaatggatggctggtgagtgaacgcctttaaatgaatacaagaccgatatgctgacggaacgttaagactctactatgtcccgtcatgttcagcgccattggcgaaaagacactttacgtcttcgccgccagtaacgccctcgccattcccatggtgtgggctctatacccagaaagcaaccagcgcacgctagaggacatggatctactattcgcggccaagacgccctggacctgggatgcagagaagacctttgcgcgcctcaaggcagagaacccaggcatggtccagtctctcggtcccaagggcagtctgttggacccggagactggaaagcctctttctgttgctgcggctgttgcggcttccaaggctggtgataatgctgcaggagcggaacatgtagatcacgcttagatgagggaggacttgatgatgtggtgtttggtgatgtttgatgtttgatgaataaccaactaataaattagatggatgtatggctttagactgtgtatcttatccctagaatatcaaaagatcatgaaagaaagatgttattgaccgaaccactctgattggccacttcgagaacaacatccatcaactctacagttcgagcttacagccttttttcccctctgactatttctctctctccaaatattcattatcaacacaagtccctaccacatctcttcgcatcaacactcacgtggtaagtagcacaatcccaacgcgtcgcgtcgcaccgttcccggctaaatacaaaacaaaataaagatccaaaaaaggcctgcaacccaaaacccaagcggataacaacatataaaaaatctaccaacatcctacgttgtatacgaaagggtcgcataatcatgtccctctccgcccaacccgcagatccaaccccagacgagcaagacccccaaccccacaactctcctcaacccacattacccacagcgcaaaccaaaaaatatctccaccgcatatccctgcacccaacgctaaccccctaccgccggcgcgtgtaccgcacgctcctctccgtcccgccgggtcggtggaccacgtactcggcgatggcgacgtatctaggatccagtgcgcgggcggtcgggaacgcgatgcgcagtaacccctttgcgccgggggtgccgtgccatcgggttcttgcagcggatgggtcgttgggtgggtataaaggggagtggaaggttgatcggcataaaggtggtggtgggttttgcgaggagaagaggcttaggcttgaggaggagggggttgtttttttggatgggaaggttaggggggtttgttttaaggagtttgtggatttgggggctaagtgagtttttccttttgtgaagattagaggtgttcctgagttggtgttgatggttcaggctgtatatatcctgaaactgatttatggattcggtctgaatctcctacctgggtacctctatgtacggtggtgaagatccggagcgggaaggcctaggcgacactccagagcgatatgccagggccatgcgctattgcaccaaggaatacgagggcaatatgtcaaccagaatatgaacccattagacccctaacaattaccttggtttttgtagtggtctagtggtatagttaatacatcgtatttgctcaacacaatattttagacctggtcaaaggggctgttttccatgagaatcacgacgagctggttattgtaaaggatatagatgtttttcccaccatattgttcctttcactaaaaaggtacaagcttctacgttcagctctgccatacaacactgaccatgtgaggcagatgcacatcggttcggttacatccgcgatcgtcacttcctcggtctctctaaactggcccgtttggctgagatgttctctcacagactccatattcaggagcgcctgactaaacaggttgctcgagctatttctggggtactgaaaccgcaaggggtcagtattcttatgcaaccatcctacctttgtatggccatgcgtggtgtacagaaggtaggtaataccaccattactggctgcatgttgagatacatgcaatcacgtgcaatagatagggaagaattcttggaactcttgcatagaacgtagctaatccttacccatcggagatgctttggctacattacgtacatccactgtcacaaccgtttgaagcataataagtaaattattaggattcgacaatacctactttgggtgctccctaaagacgtcccgatatcccagcgcttctgccttcccttcaacgagcgaagaaagattagccacaatctggtcaatatactcctgtatccacgtactttggaagatacgggaatattctatattacacgtaaggcaatgttgtgtggcatgttaagtatgcaatatgcgaaaaatttcccgcggatggtgcgataaacccaataatattttgggatcatatgtatattgcgaggcaattgccattttctgacgtggcaccaattgacgcaatgtcccaactacccctgtttaccggtagctttgaccggctattgaagaatctcccaatgtgcgcttttcctttttcggtagtataaacagagtagtgttttaattcaattaggaactagatcagcaacctgagcgtccagcatggaatcacatctgctcggtatctctcaagcactttactagacagccctagatcagtcatcctctcatgtatggatgacgagcctttgaatgaggaggaaaattttgcgtactgttttggaatcagccctgtcgtattcagatgttttcttgttatgttattcattggatgaatcctcacaacgttgcctggctgataatctgttccatagatttgagtttcatcttaccctttatactacctgcgcatctataacggcgcttacaataggcctgtcttgatatttttcagccgtgagttcgtagtgcttactttgcatcgaggcagatgactgggtcacgagctgtgtgcgtcagtctgtaatattcgattttagatatatatgtacgtctacaaatcttagtgtagtgcacgtaatgtaagtctgcttgtataagcttatcaccgctcgttcagtcattagtataaatctacgcctccttccggtcttccacagtcttttgatatgcatgcatcatctattaccgctctttgtctgtacctagagtgagcctatgaatcccggtcatgggcgatactgacgagctcgaattgtttcgccgacggtggcgcgaggagctcttaattgaatcggaccgcagggcttctcctgctgcggctttggcctcaactgccccgcctcggaccaagaaaaaaatgtctattacgacatgttcgatgtatcaagatcttcacgatgaggtgtcgagcttgctagccgaggtagatcttcattatcagtttttcgaggaagatgatgagacgaaatgcactcgaatgcgtgacacaaatattatgggccgttttgtgtgcaaccaaagagcatgcaagtccaaaggatggtctagcaacaagatcgctgtcacaattcgtctttatccagagcaaaagtacaatgccagggtataccaccaacgctgcaaagcttgcagctcgctgagccggccggttttggatcagtcatacgccgagagaatcgtttactggattaaacaatggaacggaattcgggtagagaggcctccattctcccacgaaagaagaggtcctcataacagtcagctttgtgaggggtgtagagctgggcactgctcccaatctggggaggactgggctatccggctagaaatgtttgtctccccaaccaatacatatgactgatttactaattgattgccaggttgactctatagcgagccggaggtctatggttgattgcaggattataaactgtcagaatctggaatgaataccgtcatttgttcatccttgatacagatgggtcacgtaattgacaagtttggtttttctggcgaaaacatactcactcatttcattttgtttgttcttgattactgagttattgtccacaagattgtcattttcccggactagtgtcatcttagagagtgagagatgttattgagattattctgccacgtatacactcgcattaccaccgtttttctgtcacaaagccataaatgagcgcattggcaaggacagcatgtgacgcgaaatatccatacgtcagttgctgactacacacaattttcgttagttagtactaaaaccagactatctaaggtagctgatgtttaatgacagctattatttgcaattggaaaattgatttacctggttctcaaggtatcgttccagctctgctatgatccgcatgctaactctaaaccccattatcaacttctatgttaccgggaggttgtcgtctaaattatacatgtatgtctttccacaacccgtcggcatctgaatgttggaacgtcaatgtgagggctcgatatataggcatagaagacaagtcttaccactgctatgatgtttttttccatgctcatttcgaacatttccagctgatagctacgtggctgaagatcgaccatatttgagaaaacgtggataagtccaatatgcggcaacaggagtgattcgatgcctctgactgctggcagttacgattttttaatcttctggggtcgaatgcagtttgttacttatggtctgcttttcgcgcgcgatatgtgatcacgatgcatatgatacatcaaatctgcactcccggtgccaaacttcctccgagaataaccaatcacgttctgcgacgtggatatgcgctgttctatgcaagagtgtctagtcggccagattcacggtttgctggggatgacacattttcctttcgccaatatggccatatttctatacataatgaacaactgatgccaaacctcgcctttgcctaattcaataaccgttacatctggcaccttatcacaatcatcttctttatcttattattcgtacactcgacatgagcaaggattctgtggaattcattcgaaagctagtcgcttgtccagaattaaccgagtcggacatagacgttgcgctaaccgctgctggagtagacgaacttctcccggatggaaacagaaaattatcccaattgggcttggcggcgaccgggttcttgattgattccagcattgcctttattacgttatctcgaggtatccattgacaatctgttgcgagtcttcccaaactgacaccctcgagattttacatcgaagctcaaatcccgtgtcaacggtatccaacaccgtgcagacattgcaaagcgtactggcatcgacaagcacttgaaatttgattgtcggactggtgctcgctcgtccggcgttcttgctatagcgacaagcgccctcatcggagctatatacctcaggaaaaaatgtttcatgtccgtggccaagggactttactctctagggtaggtctactctagtaaccccaggaataaatccctaattgcgcacagcgtcctagacgagcaccttgaccagctcaacttaatggaaatattcaaagacgagcagagaaatccgctgcttttgccttccttggtggagagtgattctgcccagactagcgaaatctggagtcaagatattcccccttggccggattttccgaccactccggatctagggggtttgtctaactatgaaagactttacaatgagaatggattattgaaagatatccttccagatggactttctttcaccgactcgcgttcgcagtctcctttagctgacgacccaggccaacgggcgttagagaggcaggtccttgggatttgtcatcctattgcgtatcaagaaatgcaccatggaagaccccatgaggtagaaatcccgcctgaacaagctgaacagcatgctcttcctcgcagaatgtacgatcacctctctattagcgttgacttgtaccagccagatggcttctcaggccagcccgcgaaccaacggtcctcaagtcagcatttcccacgcaagcgagaaaacgctagtggtatggaagtacaaaagagaaagtctagatgtgttgatattgaattccgatcatcactgtgtcgagaagctgaattgactcgggctctgggtttgccgccccccggagatacttatttcaggcccaaaattgaggacaagatactgagtctcggttcagagatcttttccagtctaagtacctttttaattctggttggtggctctcaatcacttgttactcttcgggcggccctaaaatacacgagagagctgggggaccaaggccctatcgttcaaaggcgaagatgggtatcacgtgagctgaccattcacgaacgcttcgaaatcatcggcgaaattcaagacaacgcggcatttctccagatcttgcgatgtaaccatatcctgcatttctaccgatgcacctgcagtccggtggagcgcacctcaaaattcatagagttagcgtccaaggatgagctcattggccagccgagagcaagaggcaatccgaggaagatggaagtggctaaagtcgtcaacgaaatgatgagggatgttttcccagacctggagcctaactcagctgtttacaagagcaagcgccgaaaaatgttgggatttcgaaaatttggacaacgcctacacattctagcggactgctttggggatgctgttctaagcatacttcatttcgatcggtccggtgacgtggcgggccctgtgattatcgaaaaaatgtgagtctatatcactatgaaatcgtggcgaaatgtaaactgaccatgcaagtattcttgctccgtcggatgaggcatttgaaacttttgtgaaggtcctcgaagaatcgcaaggaagtcttcttcgggagattagcaaggcagccgagcaagctttcaatcatattctttatgaggatatgaagcggcaaaatctttttgctttagaaacactggcaccggaagagatcctgaagtttccaaaaggctcgcaagagctcagaaatctcttgcaatagtcacgtttcctttcgaaagagcaagaaaaggcgaactgttgctttcgggacacggtgaggaggaagggattcgtacgtgatagcaagtttgcagatctattttcatattgtattgaattaaatcagcgctctgtaaaaagaaaggggtacatcgagacgccgccaatagccagtctttaaatacgctactaactaagcgttgaacagcaaacgttctttccttatttctagcacggagactacccacctcatatgtgatacaactggctaccgtatctctccacagtacattccacagtgcgtatggtgaatttcttttcccgttaattgagactatgtgggaaacttggatatatcaagtaatggtgtgacaataaaagctggtggtgcattgacatggtacatatgcgacctagcgaatgcaaacaatgctccgtccactatcccatgtaatccttttcctaatcataaccttgaagggttcattttggaaattcatgatattgccgtcctctccaacgagatgcgctgatggagcgaacacaatcgcctcgccagttcggagcctggcaattcgagagagaccttttttagcactgtcggcctgatgtggagctatttcaccacccatcggaacatgcttttcgatcgtcttgtaccattgagggctcgtaaatcggtggattacggtcaacgagcagaggtcgatcagctggggcgagatcgtcggctcttgagtggaaataattatacgcacacccaagtgtcgctgctggcggataatggtaaggaaagtctcggtaagcgcctttgcagcgagggtgtcggccatatactgcccgctgatgttaatgaataataaccaggatacttcaatatgaacaattcaccttatgggcctcatcggccacgatcatcttccctcgggaagggtgagcgtagaggaacaagtcgatggcgatacggaatagaatgcaagcagtgctttggtcgacgaaagggcacgacaagtccaggatagtgacaccgccgtcaataaagtagtcacttgtgtccgtgccagcaaggtcgagataagagtcaagcaggtctaatctttgatatagaaaaggagtctgagaacggtcaagtttgagtgcgttcagacggccccggaagtcagaataatcgaagtagccgccgctctccatcgccatttcccgaaggatccgagtaacctgtgccatgtagagggggagactgccagattgagaaacagacataagcgaaagcatcatgcttatgttgaggtgcttaggttgaagtttgaacggtcgaatctcgatattgggaatctgggagtacatgcccctgagattagaaatgtttgtgggagagactaggacgcgcagtgggaccggcggtgcatgagcatattgcggtagaacactagctaggaaggcggcttcgctgggctgcgagctcgttattgatgtatactcgtcaaactgcagcacaagagtcgatatagactggtttagggttcccaatgctggcagcctcatagagcaattttctaaggtaatatcaatgactggtgccctatgggtagaattcgaaacataccgatcatgcaagcagtggtgtgcgacttgccactcccttgcacgccgcagataaaggcagagaatggaatattcgcattcaacattattctgcaatctggggattcattccctctgacaatgtttccgagcagcatacattgagaagggagaaaatatccgaacttttctaacaagggagataccaggatggcatgctcattaagtatagcatccattgcttcttccctttgttcttcactggagctcaggaattgacactgtgcctctagggaggggaaggacggagaggcccccgtttccctcgcatggagatcgccggcaaggtggtccttgaattctattagaactttagaataccgcaaagtcagacacaaaaaggatggaagagaaagctctaccttgtagacggatattgactatgcggccaatatcattgtcgatgaccgagttcgccgcctcatagttatcgaggcctgcatcgaggtggctctgagactgttgacctgtacctatatagagcgcgttagccaaggccatttatgttgtaccgtccctctaatattttctgagatataccggatgatagaggatgctggccctgaccttggagacgggaccgctgtgaaagagtgggagcggacagtggtatgttttggacttgagctgatcctgaggtttcgatttgattgttgcttctcgacaacaaatcgagttcattcgcatagcttaggctctctttaggaactgtatatataggtaacagcgctgtacttacctgtccacaaatgccctgataaaatcagcatgattcgggctctttcccaaatattttttcttgatcgcttctcgattgatcggctggttttgtagatgacgactataaatagagtcaccaatcgccttctcgaggagagcctcagtccaatttttagattttcgtgccatttttgatagatactccaggggatgaaaagaagcctgatgaaacgatgctagaagacgaattagcagtgtacatgggggacataattatagcagtgcaaaagacggttgcagggtatgggggtattggtgcttttagtcacacggagtcacaaaagccatgattctactgcagccaaacctacaaattacttgaacgctagcgccaagtgatctaagtatgtatgtatgcatccttgctgtcactagacgttcaaggtgagtgcaggcaaacccggctgtcaaatttggtccacatatctcttactgcgacttaggctgtgcccgctcgtttggtatggtgcggtggctaaaacttaccaattcacgccatacctaggtaattcatgtgacgatgcatgcaccaacatgcaaagagcccgacggagcgcgacaagcggcgctcggttcggcgaatccagtaagggttactttggagagtggatgttgggaactatcaggcagcctaggcttagcctggccgttcccttttaggtattatagacatggtaatgttttaattccaagttgatttccaatgaacttggccgtccgtataggcacttcggagctaattccgacggtgcggcttggttcctgatctacaccagttccatatcacacagcatctgaacctttacgtctggcttccacaactcggacaagttaccggttcagcccctatcaacctgaactagatcagaagctcttctgattttctggcgtagtggcgaatgcgcaaatccagcccttgttatatgcacggccgcatggtcgcatggaaggctccgtttcgatcgtattggtatttcaagtaaagtacaaagtcataaatcatgtgacttttgcttataatactaattgtcatctgggatgaatactccctagccttttccgaggcaagaaaagaggatctacgtgtatgaggtgaaactgatttcgaacgcgtgtgtagctttctaatattggtcgggtaagttctgatgctcatgtgccatctggcaaaaagccggacccgcttggttagaatgaaaacagtgtagacagatcccaatccgactcgtcaaatcatccaaaccatagcgaatggacattcgatattcaggcacaaaatgcttgtatccatatctgcattcaacacttgattcctctggaattggatcgggcatcctatttgctcgctcgatagcctcggcgacgacaaacaaggaagtcggccaaagattctgtgcctcgagtagttttatgtaggcaaatgcgtatttgcttgtccatccacatctgtggacacacccaagagcattgatccctccaatcagaatctctcccaacttcagcctcgcgaagcccctttgctcttctagcagacctaaattgaatggtcagtcacaggtgggtcatttcacatcggttgaaacttacagaacactctgtcgcccaaaattgacctgacatcttcgctcaaaagggcaaggtaagagtcaccgtagttgagaaccagggcctttgtaatatctctgaatgcttgtgcgttcttaaacaagctcgctgcggccgcaagaacaataagatcactggctcccttattaacaggagatagccagaattcactggcaaaagttaaagcgtcaacaacgccgaatttgttcgctgcgacagcaattctaagaacatcatttacagccatgacctgaggtagcaatctgttctgatggtgcaaaattgcacaaatacatctcagcgccatcgcattctcttcgggcagtattatttccacgggaagacccgtgacgagtatatgattttccttccagtctggccctaagatagtacctggtagtttcgaggctgtcttgaggaaaattgacttcacgcggagcctcagcttttcaggtccaacaactagaatgatatcaccagctgcatcgatattcacaatcttgtcccgcgtgtctgtcatttcgaattgattggattatgcttcgcaaaaaaaaaaactgctctaaccaaagggtgcacgtaaagtgatagcctctgaccaaggaatcaattagcaatcaggttaggtgttactgggcacgggcagtctttaagcaaatattggaatgggatataaaaacaaaagacaagggcaagtgaggtttggtttaccttcaaatcgagcgtagacaaatttgaattggtgagtgccccaaaaaaggttcaaaagataacttgtgggacataaaggtataaaaggggacttcgagatcgttgacaagctctggtaaaacgaagtaataggaatcaggaaccccgatataggctgttcgttgtctccgcgtgctgactttttttcttcagcaatgctcaagacaacaccacgaagtgccaaaatataagtcctgcaaagcagctttttccgtgggatttcgtccgcttgcgacaacttgtaataagccccaaatcgcgactagttcgcttgagtgttcaaaggggggaataggtgcataataagccacagattcgtgcattcagttaatctctaattagcccctccgttggtgccaacacattggcaggggtcgggagtgaattgcaacgtgtctgagctgcaatacatactgtagagaacttttggaacgcgatcatgatagaaggaaatagaagcagaaatatcgtcaaagtgacgtgtacaatgatgggcggattaattgctgtcgaccttctattagtttgacgcatatactggtgtgttattcccatgcattggcttgccttgcttgatcgcctccacgtctgattgggcagcttcgcatacttaggcaatacgttcgttcttataatactgcatgtgcttaggcatccgcttcgcaaaaaaaataaatactcactacatttatgagaacagaaatggtggtccatggaccaatataaaatttagaatggtaaattgacagggaacagttggcccaactatttatccaaacttgtccagtcacacgataagttctttgctctaaacttagcactataatgtttaatcatgatgcacaggcactatttcctagccgccagcataagagacagcctttgggtattgtcgatttctcaaagtgtgtgggagatagaaagtctgccagctttactaatgctaaactgcctgctaattcataagtcattgatagccaacacataatgtatccgtagtagatatatcatatgtacaaccgctgtgtctgttaatgaggatacgtggatacgtagaagatgtgtatgtttggtgccttgttcgccaataatggagatatattaactagcttttcaagtctcttcttcttgccgctcgtggatgaaacagttatgggtagctgctccagctctatagtatactctgctcaatgggggttctgggtttggtaatctgttctggggtgttcatgttccgattcagagtcactaatcataacttcctcgggcgattcgatggaattgtaagggtctcggacattgcttcatgattttgttgtactttagctccgactgcatcgtctaaatctaatggcgtggccagtgtacgtaacatcctagcgtgagtccttttcccttaccgagccctctgatcccaacgaagcgccgacaagtatcagaacccttggtgagaatccacacttttttattcggttgttccctgaggctttggctttcctccgattcaccggcaatttcagtgaccaaagttctaggcatctcgaacgcagttataggagtaaaaagtgccggtagagcgcttaaaagctagacttcgatcacttcggtgcgggcttacagctggtcgaatgttagaatgggaccgctaatttttagcgcctcttgtcatccagcttatgtaacgaccaggtgatgctcatttatgattatgtaatactaagggtcgtgctcagttttactcagtgcgcaaaaagcggcaaggcctagatatcgatatttcgatgtggaatgactccaatagcgtgacaatccccagcagctctttgtcagatgattataatccagacgaacctgggtcagttccaaatgcttagaaccactagccaatttccggttggctccgagggctgaggctagtgataactgcgtaatggagtgaacagtggaccctgcgatatgcttttgactggtatatctgcagctttccgtctagtgtttgccggattcaaccccggacccgactcacagagaccaggttacgccggcttggacacgttcgagtttcaaccgaatatgcagtccagagcacacgaggtggtttgaccttttcatagaggtctatatactgaaccaatgtcactttgtaggaagtagttgaagcttggtgatagttcataggattggcgatgcaaatgcaccagaactataggccagttgttcgataggtatcttgcgagtatgcggcgatatctactatacacactgtgctgttttatacttccagcgataagcacaacacccggtttcttgcaccctccagatgtctctccaagtcgcgggtctttgctgaaacatccagtccctcctgtttctagtgcatgcgccgggaatacacctacaaccagacatcaatggtgtgaacacgatctatacaccgactacacaaaaacaacaccagagaccggcgtcacgcgagagttctggctcgatatagaccaagcaacactagcaccagacggccgatcaagatgggacctaaccatcaacggctccctaccaggcccaaccctcgaagtcaactggggcgacgaggtagtcatccacctccgcaacagcctccccaacaccgtccacaacggcacaagtctacatatccacggcctccgccaacactacacaaaccccatggacggggtagtctccgtcacgcagtgccccgtcccaccgggatatacaatgacctatcgatggcgcgcaacacaatacggcacaacatggtaccattcgcacataggtttgcagacctgggagggcgtgtacggaggtctgatcatccacgggccggctagtagtaactacgacgaagataaaggcgtcatacagctctccgactgggatatcaacacagtcgaccagctctggcacggagcagagacagtcgggtcgccggtgctggacaatgccctcatcaacggcgtcaatgtctttgggaatgacagtgacccgagtcagacggggtaccgtttcaacacctcgttcacgcccgggaagtcgtatcggctccgtgtgacgaatgtcgcctgcgatacgcacttcaagtttagcattgatcaccacattctcacggtcattgctatggatctggttcctatacagccgtataataccacagccgtgagcctggcgattggtaagctttcccttcataccaacgaaccaaccgaaggatacatctaaccaatcgaaaaggacagcgctacgatgtaatagtgcacgcagaccaagcctcaacagccaaatccttctggctccgcgccgtcccacaactctcctgctcagcgaacagcaacgcggacaacatccgcggcataatctactacacccatactgacaaaccaaaccaaccaacccttccaacaacagcagcctacaacctaacagacacctgcgaagacgaacccgcctcaaaccttaccccgataatctcaacacccctcatcctcacagcagaagactccttctacaacgaaaccctctccgcaaccgccgcgctaacgagccacaccgtctaccgctggtacctaaacagcacctcgatgcaagggaaatgggcccagcccacgctgcgcaatttcagcgccgaaagcagcatagccgataaaccggcggtgatagcaattccacaggcagatttgtgggttcttgtcgttatcgaaacgagtatggatattgcacatccgatccacctgcacggacatgattttttggttgttgcgcagggatatgggtcctgggatggctccacgtctacatctaaatcttacgctaaatctacagcccgggatcagggtacgagcaccggtctgaatctcgacttcgcagccggcgcactcccgaaacgcgatacggcgctgctgcccgggatggggtatttggttcttgcgttccggtcggataatccgggcgcgtggctgatgcattgtcatattgggtggcatcttgatcaggggtttgcgttgcagtttgttgaacggggggaggagattgaggggtttttggggggtcgtgctgttggtggggctggtgcggattggagggggtttggggatggtctggagaggaattgtcgggcttgggatttgtatcatcggggaaataatgttttggaggatggggctgggatttaatttgcttttgcgttatgaaatgaactcttggtacctgcatgtagggattattttggattaattaattaatagtacggagtagactagttacatttagggcatgcattttaggtgtacaaaggacaaagaaaagacaagtctgaaatttcaatcgagtttttctttgctttttctatttagtttctttgtattctagggatattaggatgctcgatatctcgtatttagaaaaacaaatacgaagctgcagctactatcacagagtggagtatacaaccctagagatgtaggacctacttagtccggttagtccgagcgactactgcagcacacgtactttaggggaaattcactagcaaagaaaggggaaatgctaggtagataggaaaagccgtccaggccaatgaagaaaaaaaaaatagtatatcgtaatcgtcgccattcattgaaccatcccacctaaacataacacatctaagccatctgatctagaatctaaaacacatgagcgatcagctcgaaaaatacaaaaacaaaaacataatccgaagaagcgatgcgcatcttctatacaagaccgattcataaccagaatgcgatctaaggaaaaacaggagtgggaatgggaaataagcaaaacagaaaagaaaaggaaatacagtcatgatatcatatcgtaaacaagcccgagggccagaaggtaaaaggtaggaaacagcgcaagaagaaagaaaaaaagaaaaaaagaatgcagaaggcatcacactcatgagatttgcttcgcagagcgcttgcaggcaccgcgcttgggtacgtccatgtggtggtacgagcgcaggtgctcgacgaggtggtcctggcgcgggaagccattgctacccttccgcgagcagtgctcgacggggcaattgcggaagacgggatagtggacgctggactggtggcgcttcaagtctgcgaagcgggtgaaggacttgccgcagttgtcgcagccaaagggcttagctggtctggtggggagatgttagttggttcaaggcgacagcacgcgcgacggtagatggatggtcggcttacttggatgccggcgctggcgattccgcgttggattcgtattcgctgatggggtaggttggtagcgcgatgtcttcggaggggaaggtgaagctgctgctgtagctactgctgtagctgctgccacagctgctgggtgtgctctggggcatggtgggtcggtcaaagaccgggtaatcgtgtggggtttggtaggtgtagggtgagctggtgacgttgtatagttctggggcgacctcttgcatagggaagggactggttgcgtcgaggtcgcagagggaatcgtagacgggctggccgccgtagaagaagaagtccatgctgcccggcgaggaggagtaggaggaagagtaggagtctgggtagttgaatggggactgcatgttgatgttgatcggggaggagagggagcgatgggtgggaattggaattgcagtcttatagagagagagagagggttagtctaaaatctgccatgcgaactaaagtcaagtcacctaccattgtaagaggtaaactaattatgttgtaaaggttaaaattgatttggcccagtatttattcaaatgcaaaataatttccccccgttaatggagacatcagcccttttatgtgcccaacacgaaactgcatggcagggggtgttagggtattggccaacacgggacactaacaacttctagaaaccttctcgaagcagactggacgacaccactcagcctcggggatttgctgatcttttgctaacgccgaatattccacggcccttctagcgtgtccttcccccccctctcatttcacgtaaccaacggtgattggcggaggatccggtgtcgaagccaacgaggtcagttagttggctgcgataagcagttgggtgcccagagagtttccccctcacgccgatcctctcatgattggccgttggcgggttctgtgcgtcttccgtgtgtcttctgtgtgttctagtgtcattctagcgtgccaagaactcgtgtctgacatgtttttttggttttgttttgttttgtttccgtttcatgtgttgcatgatgtagtgctttgtgttggaagtaattgtattcgggctgaagtcagagactcagagcaatatcaattcaatatcaacttcaatatcaatatcaaagtccacttcaactcaactcaaccagctcaactccacttcgactgcccaactccagacatccaacctggtattgacgtatatcggcacaacggcacaatcgtgccaattacatcaccggatcaagatccagccttaacccgaacatctccattctccatctccacggagaacttggtcgtctaatattcccacaattcccaaacccctccaatccggggtcagagatcgaccgatgatgtcgcggtcgcgcacagccctgacgtagcatctactgactagcgttcgcatatccccggcttctagaaaggacaaatcccgcgctcgagctgaaagagcccatgcatgcaacccgtaatgtatagttacggagtactccgtaactagccccagcgaaatgattcgtcatatgtcgctcttttgattttctttattcgatttattctcagtcggggatacatgacattgcttccggtcgtgttgttgggcaaccttggacttggcttttatgagccccgttgcctttttcctttttcctttttccgatttccggtttttgtcgcatctcgggcttatactgatatatttttttcgctattggcttgcatgcacttgcatatctcctgcattattgtcccgggatgggaaacagtactccgtagacctgcagacctacgtgtccacgagcaaatacgataaccccggacgatcatacggagttcccggggtatggaattaggtacttatgatatctgctgatccagggcctggcccgtacccgtacctgcaaggcagactgcgcataagcatgctatgcactggacttggctacttggttacttggctgagccacttgcctacttctgtaatatgcttgacttaaggattcattgtattcgaacaattgataaccttggaaataacacgaaactcccgtatcaccgaggcccattcattgcactcattgatgccagtcctgcgaaaacagtaaaagaagagaaaacacgcccaccgagaccccacagtttccagagtacccgccatagcctcaaccatccagtctatcgaaccatagccgcaaagccaccgatagtgtaaacgaatccagggtgaaaagcaatcatctgcacttggagacccgaatgggtggctcacgagtaaaaaaaaaaaaaaaccaaagacgcctcataactcgtcctcgaggtatttgtacacaaacttgaaatcagccttgcgccgattcatcctgttgttattcgtaagtggtgagctcgtcaagtgggtgagcaaaacgaaatcagtcggattctttaactgaccatgtgctttcgtagtcgaagaagcgataggtgccttgttcaaactcctcggtaatgttcttcggctcctcgtgacgctggaaccaggtttgatactgcttgtggaagcgccagctctggttgcggagcgccttggccgcgagatattgctggtacgtcccttggcggtagtagaaaaggtagaagagggtatccgtgtcgattctcccggtatcgtacaaccgagggtcatcgaatattggaagaggttcctgtggatagtagagcgcagtgctgtaggggttttgcggcttgtagtgacgtggcttttcggcatcgccagcctcgggacaggtcgtcaaagaggtagcgagaaggcgctggaccgacggcgacgggttggccgacgcacgggacttggtcacctcaaatgattggagcaggtcctggagaccggggggcaggtggtagatcgattcctcactttcggtttcttctgtctctagtttaccgttcgttgatgtctccgcctttgcaggcgcgggcgataagacacttgcactcacagggaccttgggtcggacgtgcccagcgagctcttctgtaacggcggctacagtgggtgggattattgacttcataacaggctgtactgacgccacactgggcgaagcagtggaagacttggagataggtagtgccacggacagagccgggctgaaacccggtgggggtgggagagggagaatgccaacaccacttttgtcacttgctgcggcagcggcagcggcagaggcatacttgagggtttcaccagggggacgggtcggaaggggagcaggcttcatgcccggagcactcgaggaagcagaggggtggagggtagcaagaacaggaagcggggatttcatctgtgtggacggtcttcgggctgctggcgcttcttgcttgaccttgggtttcggttcgggctcttcgtcttggattgattgcgcgtcttgtgatgatacacgatcaccttcgccgcccatgccaaattgtgcctcgatctcctcgccgatatttagatcgtcgtagagtgtttcatcttcgccggagtagtcaagactgccgccttcttcgacgtaatatttgatactttccttgagatcttgtaccgcacccacgtccaggttgccgttctgtaaagaacgattgaggaattccaacttgttgacgtgccatttatgtcgttccgtaatatgggagatgtcggccagtcgatctgccttcttcgtatccttcttccctttcttcatttgtgcatgaagtgtttcctcctctgcttccaaggcctcgatcttcagctgaagctcgtcaaccatggtggagagaaactcggaacactcgactctctccttctccttggggtcaagtcgcgaagctgccgagagaccttccttggaatatgctttcgtcttcatttccttttcgacggctttgaattgttccatgcactaccgacaatgttagcttgctgtcctcaaccattggactctgcgggggaccaagataggaaacccagacataccacttcaatcgctttgcgctgctccatgagtggggctttatctttgacctcgttcccagcagcccatgacttgatctgatcacggaatctttgaagcttcttgatctcgcgcttaaggtggtcttcgagcttatcccgttgcgtaggattcgtagcctggcggatcttctcgtaaatgccttcaaacgtttgtatcccttcggagaccttcttgaaggttttttcaatttcctgttgtgtttttcgggctgccattgtgaacccggtggtggactgtgccgtcctggcgtcggattaatgcggtcggaacggggagatgatgcgctttcgaccgaaatggtcacaagtacgaaattaaggtagttggtgaaggaagaattgtgggaagaagggtttgtttgacagtaagagggacacaggctcggaagtccatggaatacctctccgcgtttaagtggaaagcttcgtggatgctctaataggtaggcggtcacgggcggaggcaaacgtgagggcggcgcgagggggattgtgggcgttagacacacaagtcgctcgtcgcatttcaatttctcagtgggaaagaacacaacttaccacaaagaaaccagtcgcgctgacaaactgcgtcaaacgagctcattttggcaataccacgcatttgctgccagcgctatcaccagccttatctaccgcaactgcgtaccccggctttagaagctgtctctcattttgacacatacaagatctgttggaaatcaagatgaaaggtgaggatctctgtacctatactatatacaaatcaactcaccccgttcagtcatcatccaaagagtcaaatcggcatccgtgacagtcgattcggagctagtctcctctattggcaagggccttcttgtatttgctggcgttggcaaagaggataccgagaaggaagcagagaatatcgtgaaaaagatactgaaggccaagttctggcccgatgagaatggggtacaagtaagtcaatggctatcaggtgtgagaccggcaattgacatatcacagtggaaaaagaatgttcaggagattgagggagaagtactatgtggtatggctcttcatcttactctccagaccactgctgaacatgactagtctcccaattcaccctctatgcaaaaatgaagaaaggcaacaaacccgactttcatgatgcagctggccctgaagctgcacgcagaatctatgacttcttttatgacaagatgcgggaaggttatactccagaccgggtcaaaaatggtgtcttccaagccatgatggaggtcgaattgaagaacgacgggccggtgggtgtgaactactgcagcgaggacgcggcggtacattttgaccttccagttcctttcctcgccttcattgattatatactgacttggtttcattctaggtcacaatcgaaatcaataccaatcttcccaaaaaggaacccaaggagcagaaaaatgacgacaaggataaacaggacatcaagggatcttttgaattccaaattcccccagaattgctgcagtgaaaaaaaagaaggagagaaacaaaggaagattaatagagattagagtaatgctttgtacttaaacgttagcagatacccccaatgcaacttctatacaatcccgtggtccaaatatagttggggtcaatggaagcttcctgaaccacaagcgccggactcccccacaacgccgacttctctctcctccacttctctaccatatcaccttcatttctctctcgtattctttttcacctttgaaatttcttccccgaaactccacagtcatggcgaaacctcagcgtacgttcagtgcggggtccatctgcccgcggatgcaataattgagtcgagtcgctgacaagctcgtaggctctcgtgtcttctttgacattcaaatcggtgacggcaagcctagccgggttgcctttgagctggtaagttgcccgcatcctctatatgccgagtctggattgcatctaacatccgggtgttgcacagttcaacgatggtacgacatgattttctcccttgacatttcggacctgactaacagcaacagtcgtccccaagaccgcggacaacttccgagctttgtgtaccggcgagaagggcattggcacccagggcaaggaattgacctacaaaggtacgtctacaataccccgctcccatcgcgctgacgcccactaaccgcggtgtcccgatctaggctcaattttccaccgtgtgatcaagcagttcatgattcagggtggtgacttcaccgcgttcaacggcaccggcggcgagtcgatttacggcgaaaagttccccgacgagaatttcgacctcaagcatgaccgccccttcctgctctccatggccaactccggccccggcaccaacggcagtcaattcttcgtcaccaccgttcccactccccaccttgatggcaagcacgtcgtgttcggtgaggtcatcaacggcaagaacgtgattcgcaagatcgagaatatgaagacccagtccgacaagcccatccaggacgtgaccatcgtgaactgcggcgagcttaccggcgaggactacgagaacgcggccaagcgccaggcggacgcgacgggcgacccatacgaggacttcaccgaggaccaccagggcgaggagcttactgcgcctctctgcttcaagatcgcttccgacctcaagggtttcggaaacgctgctttcaagagtggcgatctcaacctgggtctcgacaagtaccagaagggtctgcgctatctgaatgagttccccgatcccgcagacaatgaccccaaggagctgggcgagcagatgaaggcactccgattcaccctgcactccaactcttccctgcttggtaacaagctccagaagtaccgccaggctcagaactgggccacatatgcgctccaagtcgccgatgaggctaaggttaaggatgctgatagggccaaggcttactaccgccgcgctgttgcccacgagggtctgaaggaggaggatgctgcgctgaaggatctgcacgaggcagagaagctggctccgggcgatgctggtattatcaacgagatcgccaaggtcaagaaggctgtcaaggaccgggaggccaaggacaaggcggctgccaagaagttcttctcttaaacggtttgaaattgattcatcccggcctttcttttgttccatcacgattcacgacgtggtcttctcgttcaacaatgacccatgatgtatgatatcacatcattcaagcaatttgccttgctcttgtgcgaagtccatactgtaacttctttttacatagtagactcctgtcgcatagcacgttaggctcaggtgtaggattactcaaatcatcggggataaaagttgccccaaaagtatcaaattatatatttccaagtatgacctggtagtaacgcactcatattttctagacggagcattgcaaccaggtctaggcgacccgctatactaatgataagcattagcctgtgtttcagaatatattggctactgcttcagtcttgtcgatcatatgttttggatcacgcctagtatcgccttaggcgtttcaagtcctttctcttcattttctgctcggattttaaaaatcaggcaatgagcaatgcagatatccactatcggacgttttatctgagacacagttggggctgatttaggtggcaaccagatatcgtagtcaaccgtgactggcagactacacagaaccttctgattggaggccaggtggacaaatatcggaaaagccaagaacaatcacatataaacagatcgattgaaatatccaactaaaccaaacttatatatccaacttctcccttcattcccatcctacttggactcaaaagcgcaagttcccatctctagcttgaccacatccgcctcaggccgaatatcgaaatcaaagatatccatcggcaccgaaagcgtggtacaagcattcggaatatccacaatgccggcaatatgcccctgcaccggcgcgcagctgagcagcaaatatatctgataatcactatagccatagcgccggagatactccataacccggagacaggtctgtctataggcgactgtcgcatccaggaaatgctgcttgccatgctcgtcgacagagaatccctcgaacgtcaggtatcgcccagggccgaactgcggctctacaggtcctgcgtggaatattggtgacttcatggctagtttcgccatgccgtctttgatgacggtgaacttcaatgtgatcacaccggccatttcaatcgccccgcagaatgagatctcgccatcgccttgcgagaagtgcaggtctccgacggagaatttggcgccggggacgtgcacgggaaggtagactttcgatccccgggagaggttcttgatatcgcagttacctccgtgctcggggcggccctagtaaacgtgtgagttttggttcggttttggggtatattgtcatctctcactgggatggttcgagcaccctcattcgcgatcttgctcttcgcgtcatcaatagcactgcctgcatgggcattctggggattcggtggttgagcgacaatttgatcggcaatagtattggctgcaatgagttcgccctctcgacgattccattcagccagaacttcggccgagggagcacatcccagtattccggggtgaatcagtcccgcaaaccgaacgtgcggaatatgccgggatgagcagaagattccttcaaagtcccagatcgcctttgctctgcgatgccgttagcatggatacatgttatgatattacatataattaacatacgcctcgggatacagtcggtctaggaaacctcctccattctctttgtggaatatcccggtgaatccccacggctggtcttcgaatggctggacatcctggatctcgacgagcaagacatcgccaggctccgcggtttcgatgtcgaatggaccagagaggtaatggatttgggttagatctacattcctgatatcgtctgctgagtcgttgtttccgatctggcctccggtccaatcgagacattcgatcttgacgacttcattgttggcgatttttccatgagccggaactggacgtggaattagcatgcatgtctctaatgggaatatgatcaagggacataccatctggatgccatctgttctataaggaacttagcaatatcttacgacttcaagaacgcaagaacatacatgtaagccgggctgttcccacgcaggcttgtcgaggtcgacctttagagcagtacggattcccttgatacccatatttgcttttatccaagggtttgttagttgttcgacgtggttgaggcagtggctgtaggctaacaagagtataatctcgggctttggacaagctgggacccttaaatagactgccatatcccggcccctcttacgataaggtcttgccccgcagacacccggtccattgacatgttggcgtgaataacagttacgtgaggcgttggagaactggcttatcgctttatctcgcagatcaccccgacctcggggggtctgataagcttgtacttatgtacccctcagggacaattggagatgaaatgtatttttgtaaacaaggcctatttcggagggcaacaatgcggggatggtcgccttatatgctaataattgatggtgtctgtgcaatcgcaaggccatatatgctcgaaaaatacttgccgtgaagtcttagtgctgacagctctcaagaaaacctctttccaggagagataggttccttctggtctggctcgtccgtgtcgacattgagtttgtcaagattatcgagagataagcgcaagaaatcatgcttgttcttccaggtaatctggctttccgcgaaacctgtactctcagcaggaggtggaggcgggtcggttatcttggtgacaaggtacgctgtagatgcctcagcaacgccatacatcagcacaccaatgtacgggatacgcagagcaaccgtgaaagcaaaggcaaagccaaagagaacaccttctcgatcgctgaaccaccggcgcttttggtcgggggtgaacttaatgcgccaaaagtagggttcgagctagagactgttaggataattcaagtgcggaagggtaacttgacttacaagctcacgcatcagactgcgtgaagcaaagtaggtgtgaagaaaagtgacaatgtaatgcttcggcagaatcaaccctatgccaaaaatgacagccgcgggggtggagccgatgtggcttcgcaatgtgtagaaacttgctgcaggcataacaaaccgaccgatgatcgcaaccatcgaaagaagatagacaccaagcattataccaatcttctttgcatagcggttgaagaatgacttcagtgctttggcaattggtcgagaaacgctggagccacctttggcagagtactggacaagattggggtagtatagagagcggaggtgacgggggtcttcggatttatgtttctggatgtatgtagtgtccacccattgaatggactgcatgaaactagtgagacggtcagcgaagtatcaataagttggttgctaagagaatgtacatttcatctagggtgggcgtcacatatcgcatcaaggtcatgagcaagaatggcacctgtaggacagacttggacataaattccaacccactgagaagcttttcgtcccagactgcctgttcaaggttgatcacccatgatacgaggtatatagagaatttcacgctgaggatcttgagttcaagtcagcgaaaaccctccgtgcggggcagtatagaaacatactggaatctgaatgatcaattggataacgatgccgatggctatcgcaagagctgcttggcggaaatggtcgtacttgaatagttcagggtttcctaatgcacgaacagctgcaaccctcagttagtaatggcctagaacgcgttcccatccaggggatcattccaaggcaaatgacaagatgtggctggttcaatgcagcacaagcacctgatcaatgttttggcatagccgactccaacgttgatagaatttcttgtgtagcctggaatccgccaaggtattccaacctaattcccctggacgttcggggtaaacacatggggtgacatactgcctactattgtgagctgaaagccgcggatcacagcgttcggctcgaagttcgacatcgttgctttcaatgctgtggaagaaccaagtaaataccaccacgtataaccccagaagtgtcgaaacagttaagaatctagcaacaacgcattcttgaaaatgagaccaaaaataactgtgggtgcctgctcagctggcattgaaagctgcgtcatgatcacctgatctcggcctaaggcaacagtgcatctccccgcgcaataggccgcgcaactgcagataagccccatctcctgcgtctcctgcatcggatacctggcttctcacattggtattctgtacaaacatgtttgtacattaatatctcctttgccccttatcgatcgcatccatgaaccatgcccgagtctccaagtgagctacactctctccgccgctctgccacccttccaaccaaattaaatcctctcgcccgacgtcgccccagcctgcccgaaaaacccccannnnnnnnnnnnnnnnnnnnnnnnnnnnnnnnnnnnnnnnnnnnnnnnnnnnnnnnnnnnnnnnnnnnnnnnnnnnnnnnnnnnnnnnnnnnnnnnnnnnnnnnnnnnnnnnnnnnnnnnnnnnnnnnnnnnnnnnnnnnnnnncccgcgcgacggggcgcgagcgtgccgaatacccccgaacatgtaattttctatcacccatccgcgaaaatcgttcatttctccccaagagccctcgcccctatcccatccagttctacgccgtccgacttcgactacccggtcgatactatcgagacactcccttggcgctctgcaactgagcgaacggtcgcaacagcgccactgaggttagagaaggtccatggctcgacagcgtttctgaaatgtggaaatgttgtccacgcaattctgaagaattcgcagtgttggtgtgtcgacggggtatcgaagtttgttctacgcattcgccctcttacatactatcgcatcgaaataccatacgagacagaagagcaccggagtttggtgcgggatctgaagatcgcattgccaacagtgcttcgatatgaagtcactccatgccctttcaaacgctctttcagcgttgagctcccgaacgacgcaatggcacctcggcgcaaaaaggcttggcaaccgaaagatcagagagaaagagtaccgaccgtcctagaacctccacgagagacaccatcaccctcttcaataaggtcggattgtctcgattccgccagtgccggggatgacaccgacggagacctaaccgatgacagttgtttcacttcaaacaaagcgagcagtacaattttggagactattcccgacgatcgggcatcctctcccgttgaggctttgagtccttctccataccaagggcctcctaggcggtcggtgactgaagtaccgcaaactttcactagcctgcttgcaaagtttgaggctacgtcaggcgcagacgatgaatacgatattgatcctttgctcaagccagaatgcgcatctagtactgatgctgcacttcaaattgatcatgagctcaaggttacagaccaactcgaacctgagtttgtagccgatagtggagttgaagccggacctgaatccgaagctgtcctagattctgaaatcaaagccgaagcggagcttgagatcaagtctgaactccttttagaagctatatcaccagccgaacccttcaaggaatctgcagttgaagccgaacccagcatcccaattgagactgacgcagtgttggcggctgaaacttcagacgaagttgtattccgtgctgaaactaccagtgcagtggggactaaggcagtgctggaagacaatctcgtgaatgtcgaagaagttcaacgcgtgcaacccactgccaagctcacactggaggtcgaccatgatgcatcctttgcgtccagtcccgagtcattccattctgctgagccacaatcgccggattcagtctctactcatcctacatctgtgggaggccccgatttgcctgaatcagaagagatttccaacctttcgagcataaagcacattatttctggattggaagcgtcagcggatcagtgtaagatgccacagcccccaacactcggtattcctcaaagcgacaacgttcccaatccaaccagcttgcttcatcctccatcaatgcatagcataagctcgaataatgtgcctaggcgcttcgcagatgcgttcgcagacacctcaccctcaatggcccctacaaacaatggacaccgacccagtcgttttacggatgtatctgcggacacggaaccgcggccaaacattcgtgccaaggtcgctgctttgaacactgatctcgaccacatgagttccgagttccggcgccgggcaaaagccacaagagagcgtgacgtttcccctatgcctcattcttcggcattgtaccagccatctagtgatggctcatcatttatttccaaggctatcaccttagtattgatccccccggcctatctttttgtcattctccttcatatcgctgcgcgcattgtcatccacccaaccattcagccgactatcagctccccaccgagtgaaccaaattctcattctcagccaaaaaagaaggatccagccacagaggatgacttcagctttccactggaacctcaaacttcctcggaatatgaggatgctgaactcttcagaaaactcgacccttgggatctggactagttgggtggttgaaatgcccccttttaatttgcttgctctttttttcttcttctggatcttcgtcatcctacgctcggtttaatgcttactctttgtattcctccctctttacaccatcttaatgtttctcttgttatgatatttggcgctgattttgcacgactcatgggtggatatatgacatggtttgtattctactgaacttctgtattctagcgttacgtgtatcattgaggtgaaatccggggtcatgtcagaaacgaataattaattgacacaaatacgctctttcaatttccagacggttctattccatccaacgccattgaccctctactgaatctgaccgaagtcgtcagagatgaaacctacgaataggggcatgcccaactgtaatgctataagccgttcatttcttttcccgtcccacaggactcgtataaacagacacgcccgtgagccacaagcgtaggggaatatgtacacttgataggaaattcgcattgaaaaagcgagaagaagaagccagaaccaccatcgaacgccagctaatgcatgagaaaacgaagccatgacacacctcgcttgccaggtccaagtacacaaagacgaagatgccatttgggaaatagaccgaagagcaaatctatgcttttgtgaccttagcagctccgcccttggtcttggccttgcggcctcggcgatctcgcttcttcaacccagtcattcctgtcttgcagacctcggcatagcgaacgtagaaggcctcaatatcatcggggctgacaatcgtcgagagcttgacctttgatgcccttttcatgctgatcttggttgcctcgcttgcattcttggggttcggtgtattggtgtttccatcagttgctcggatgaggatagatggttgggagtttgtggtagtggcgccgggcacatcgatgagaggtttttgagtgagattgaccgagccatgaagattttgggaggttttggagagcagatctgcaagagatttgaagaactaaagatgatcggtgttagcgatatagctcggaactggtggtcgtggtcgcatgcgcggaggtgtagcggtcaggtaaacaccaatatcaatatttacctcgtcgtgtcccaaatgtggggccatatttagagatcttttatgagccgcgcgataattaaatgatccgaaagctggagcagatgatcaatatacagttgacagctgggcacaactcacagtgggggagaaactccgctgtgggtgcctctccgcctttgttttggggcagcagaaaagtgaaaaaagttgtctaccgcccggcgtacctgatagagacatttgaactcttcaagagcagacgaaacatcccagaggaccaagatgcccaaaataccccgccctcggcataatacgacggccttgcctcgggatctgcgatccgagctcggaatccgcgatgtctacggtgacaagaagcgccgcctcaatggacctgcctcgcgcaaagaacgccgccaaaatgagcgtacgcagaagaaatcccgacatgcagccccgccgaacaagaagaccttggagcatccgcagcagcgacttcagcagaaacctcgacagcaggatcaggaggaaagcgacgaggacgaggatctcgatgatatggatctcgacgagggtcccagtgtgcagacaaagtccaaatccacgaaagacgccgcgaagaagcccaaatctattctgaagaaagcagcagtcaagcaagactcagagtccgagtccgagtccgggttcgggtcagaaatcgacctcaatgaggacgaggatgaggatgaagatgacgagtctgaagatgagtccgaagatgagtctgaagacgattctgaagatgacatcttcgaggatgaacccaaagaaaccgaagcccacatcccaggatcggtcaagtctaaattggcgcaagacgatgctgagattgctgcattggagaaaaagcttggcctcaagaaaggaggtaaactaccaaaggcgtttgaggaggatggactagacgagttgctaggggatctgggtggcggcggcgatggctcagaggacgagagcaaaaagcgcaaacgagaagccgatgaatggctacgaagtaagagactcaaggccaagagcttgcaaacccaacaactcgaaaaagacgacagtgaaatggatagcgctgaggatttcgatctcgacgacgaaatatttggaggcgatgacgccgaaggcagtgattttgatggtttcgacgaggaagaacgcaaagaaccaaaaaagaaagaaaacccatatatcgccccggtcacgaagcccgaacccaccgctcagaagtatatcccaccttcattacgaggtcgctccgacccggaaagcgaatctctcactcgtctcaagcgccaggcccagggacatctcaacaagttgtccgaggccaatatgctctcgattgttgccgaatttgagaagctttaccgcgattacccgcgccaacacgtcacatctaccttgatcagcctgctaatgggtctaatttgtgagagggctgcccttcaggacaccttcctcattttgcatgctggtttcattgcggcattgtataagctcatgggaatggacgttggcgcggagattatccaaactgttgtcgaaactttggatgcagatggcgacgagcgtggaaagttccagggaaaagaagctactaacctggtctctcttctctcgcaactttacaacttccacgtcatcggttcttccttgatgtttgactacgttcgtcttttcgtgcaggagatcacggaatcgaacaccgaactcttgcttaaggtgattcggagtaagtgatatacctagcccacgataaagctactagccatctaacatgtcgcagattctggccctcaactccgactcgatgacccgtctgcactcaaggatatcgtattgctcattcagcctgccatcacaaaagtcggcgaggaccgtctgtctgttcgaacaaagttcatgatcgacctgatcacggatttgaaaaacaaccgctcgaaggcttcagctgcagctggtgcaggtatcaccacagaacatattaccaaaatgcgcaagattttgggttccctaaacaactcgcggacgattcgcgcatccgaacctattaacatttcccgtgaagatatccacaactcctctaagaagggcaagtggtggttggtcggcgcaagctggaaggatgatccccttgtgacagcacagcgagagatggctggtgtacaaatgccccaacctcaggtcgaggatgatgacagtgacggcgaacctgactttggagtcctcgcccgagctcaccgcatgaacacagacgttcgtcggtcgatttttgttgctatcatgtctgccaatgacttccaagatgcgaatgtccgactcatgaaactccgtcttaagcgggcacaagagtttgaaatcccccgtgttctcttgcactgtgccatggaggaggaggcctataacccctactattctctgattgcgcgtcggatttgcggtgaacagggtcgacgcatcaaagtgtcctttatgtttgctctttggaatatgttcaagaagatgggtgagcgaggcgatattgacgaagacgaagacaacgatttcgatccggacgatgaagaaaacggtgttagcatgaagtccgtggtcaatctggccaagatgttcagcgccctcatcatggacggcagcttgacattgagcattttgaagaatctcaacttcgcctatctgcagcccaagactaagacgtttgttgaagtcttgatcatcagcatcattcaacaatctcaaaagtccaagacgaagaagaaatccaagaggtccacgccagatgagcctgagaagaatgaagcggctttgatgcaaatcttcctacgtgtcaaggagacaccgcacattgccaagggccttatcttttttgtgcgaaaggttgtcgcaaagagtgatatcgtgtctcccgaggaactaaaactagtccggtggggatgcaatgtggctacagatgcccttaaggctgtggcggactaaaagttgcattggattcatcttgcaattgcatatagaatatacccaatttgttacgctgctcctgatttgtttatgttccacgcttgtcccgaacttcgaaatcgccattgctcatttcaacaagagaagaatgaatcagtgatgtactctgtaccccgtacggagtacaaatccagcatttccaatgttcacctatcctacttctactgttcgaaatatatgaaatttctgggctagacttccaaataagacggtaaacagaactggtggaatagtaaagcgaacttgttgagcatttccctccacgaggagttctgcataccgtcattacaattccgatatcgggttgtttattgttggatgaacctaaatcatctcttttgcctggaaaaatgttggtcgttgagatttgggtgtttcacatggaccaagggaactttatgttgtcgggacataaatcataagccatgataagaacttgtatgtaagtctatgaaatataatggaagggaaatgatacacctcccttataccgatataaatcgccgttagtcattcagctgctccaatgaggtcccattccatggctatgagccagccctcttttgtctctagagatccgccattgtcagatggaccacgctccgaaacgtaaccagatacctgaccaggtgaccgacgttcgtaggagtcattcccgagctccaaactccagttgagccctttgtgaatccccactaaatccccttttcgcagttggggtgttgtaattgcatcagaacgcgagggattttgacgcacgacggatttagatcgggaagttcccataatcatgatattcaagacagaatcaggatttctcccttgtatatgattcccagtaagtagttccgcttgaagaaaggccagagagccacagccactcatagatgactggctgacatgaataacacgcgcagttaggagatatgcattcggcttttccggcgagtctgaggcctggcccaagggaggttttggtagctggtcacgtttcgtccccatttctaagatccaaccgcgtgcctcagcggccattccgccagggatgtaattggacacaccggctcggtttcgaccacggcgatgcagtgtgcgcgaggaaggagagaagggtgcagggatgtcctctgcatccggattcggcgacggcgagcgaggcaaaacaaaaaccggttttcgtctctcagacggcgatatgcccggttcgtctagtttgaatctgggcgcggactggctgctgggaggcctcgccgccgaggaaagcataaatcgaggacgactgcggaatggtgttttcatattgcttggggtcgatgcggcttgtgcaaatagacatgcactcggtgcgggatttctctccatacccatgtcccatgccgtagtgctttgcctgcttttatcagataaagcgatgggatcggctggaggatccacggattcgggtggtgatgacaatattggatcgatatgtgtcagatttcttcgatgggagggtgccaccccctctacacgacgccgtttattcccatccctgaccggcgaaaacagcgcgtcgaactcagcgtccaggattcccggagtctctgcttcttcggggggagtgctgtttatggcatcgtctggtagttcgtccgcatctctccctccggtttgcacatctcctatgcctgcggcatcatcagagtcctcaatcacgtcgcgttgttgacgcgagccgggggcagtttgggtaacaggcaggttactcgcgactttacgcgttgaagatggcccgtcatcatctatgagatcaagatcatcatcttccttctgtgcgacactttgtgatagtagaaaccggggtgtggaggcgaactgagggccactgcggcgcgtggatgggttgcgacgggcgaggcggaatggtgatggagtctgtggccagtcacattagcctggggattcgataaatcacgccgtagacatactgccgggaaaggcatttatctaaagtatcagaattatggagcgaacaccatggcgctgcttcaatgcacccagtcggatagatctgtagttaactactccgtacataaaaagcggactgatttctcaggcatgtaaacccgcttgtgaattagctactaaacctatttaggaagtaagttagagcttcagttcatatattcttcactccaggcattcctccttcttttatcttcttttaccaatttctaatatctgagctctgcaacacaaccttgcatctgacatctctttctttttttccctttcttaaactcaagtctcaagtgttcacaactcggctcgtccttcttgtcctcgctcctatctttgacctaactatcagatccctgctcttgtggcctgtgatactaagacaccatcctataatgttttcaagcaaaaggcgacgacctaacaaagaataatgaacgtgatcctcgacttacaagatcaagcgcacaagctctccttctcccagctaaaggcgtcaattgcagttctcgcatcaacaattcaaggtgatcagtccgagctaccgacggttgcaatttctcctttgaatctcagtgatgtccaagttatgctcaagttgaaacattcactgagcaaccttgagttccgcaacaaacctccggttgggctgtctccgatctgtggtacgtatcccttagggaatattcaaaataaatcagtttactctcacttatctttcaacttctaagaggtattatactgattaatcgtcacttattgagctatatatagataaaattcagagaaatccaataagagttatagagatcagtttgtttgcaaagtggtcagcatcagtcattctgcacgtgacttatctgagcatgatcactgatctaaacccgtgctgacatctaacgactcagtgaggctgagcctcggcaccctcataagagcggcggcagcacaatcaaatatgaaagccccaccccagctccggtatgtataatgacataagtctactgaatgtagacgcaggtgaacagtaacaaccaatggatataactacctgacgaattatcaattagggctcttaaatgatatcgatattccgatcggcgcgacttggcattaaaagatttcctaccttttttacctgtatccctgaccgcacatttggcctgtcctgtgaagagggatcctagatttgtcaatatgaagtaatctaaattaagggaattgttgctcgtactagatgcttagattttcagtacagccttcctactttggtcgagtacctgccttaacacttgcttctccctactgctctcttaccgcttccaaatttgtacgcggcaaagtacggcagaaatttggcagaattatgagtggtaccagatcaggaaggcggcattggaatttcaggccgcggctgtgagcattagtttctcatgattttggagcccataggataaaaccccttggtcatgtgacatacacacacgaggttatgatttaattgcttcgctttgctccgccattactccgtactgatactaaggataaactttcgcacctaatcgtgtcgtgtgttggcgcctggcaagtacgttatgtacacacatgtatggttgagatagctgtcttaccgccccctctgtcccacataacgagagtttctcacaaaacgagagtttctcacaaaacgagagtttctcacaaaacgagagtttctcacaaaacgagagatttctctttttaggtatctttcatatggtatacccatacaaaaggtacataaacatgaattagagattttgtcacttctaggaatacttacaaaaaatatggtaggtgatatatagtctaaaggaggtctattttatttactattaatatattaggaagaaatattgagtattctccaagtggtagaacgttgatgtttctatatacatctctttcgtaagtctttacttttctgtataagatatctgaaatttattttattagccaattagtttaactataaatttattattgatttatactcttatttctcctttaactagccaaagggtcgagaacatgatatgaggtatatgtaccttttgtatgggtatgccatattaaagatacctaaaaagagaaatctctcgttttgtgggacagacccacccgccgttgatagggtggagccggtcttattcttgtaatgccaagatcggaaaatcgatatcatttaatagccctaattgatgattcgtcaggtaaatcgttggaggagtaattctacggcagatcttctactttctagttatatattaatagagtattaatcttcttcatatccattatcgattcttttcataatccgaattgatcattcgtctggtagttatatccgctggatcgggtcgttactgttgacctgcatctacttgcatgctgtctgggctactttgtcagggctactttcgaattacgagtattaaaacttacttatttaaacccttcccagctcatagaacttggacatgatctctctttggaatatacccatcttccaaagctttctctatatcgacttctcattgtctttgtggcttgattcatttgctttttgtcaattcctttcgtcatgacacgcgctttttccaacgaccatctcgaatctttccctgttgagagttatggtctacctcacagtatggcccatgctcaaaatacaccccaaggcacacttcactatctcgaacaggacctcccatttcaaagttctgtctatggtcttccatgggccttgaatgacttcgacctaaacatgccaattacatcggcacaagccaacatcgagtctcttactggatctgttagagacaacgcctccccattcggagcagagaacacaacgaatagtgcctggatggactgtgacagctctgctttggatggctatcagcaggggctcttttcgctcccagcgggagaaccattgaatgagacaccctgtgagggcagtccgactgatgaccgaacgtctcgtaggcgtcgctctaaacccaacgccaagtgagttcctccgatacagatctctacccctatcccatatctgtgtttatctaatcaatcaatcctccaaaggagcagcactggtcctgtcacatgtggttgggaaggttgcacatacacactcccgttcactcatgtgatatcgttgtggcggcatatcaaggacaagcacatattccctgatgcgttcaagtgtccctctccacaatgtggaaaggcatatggtcgaaaggacaagttgcagcggcatttgcgatcgcatgcagacgcggaaggtagaggtaaatgtcgttcgtgccatacatgatagtacaaaggttattgataatctcttgtctcttttttttaattttgtacttcattttcttaataaatcattcttttatacggtcctaggagtttctctagagggtaaatggcgaatgttaggtagtttagatatcttctctaaaatcgtttccagatattctagatataatgtagcctttacgatgcttagcacaaaacaaggtggagggcccaaacgaggcactggaaaccgtgaaacataattccacatagctgaaaggaaaattgtgacgtaggggggaacagaaccggagaaattagactttattagtcaacctgtggtcactagttaactagttaccaagttactcttctaccctcccatttattttaccctttgtccccatctccaagatacctgccatggattcatcaatagaatatctcaccgatcttgaaggaacacaggtcacgtttgatgccgttgcagaaccaccgttcgagttccctgcccagacatggatgatacttgagaagcttgaggaagagtcgaatcgcctgacaatcgaggacattgtcgcggagctcggaccctcagacaccgcggggaagttcctatgccgacctgccggtgaggaagacgataacaggcgcgcatttttgcgcatttatcaacagattcctattgctggaactgaaacgaagaaggccgccatacggggtcgccaggccgtcgatacccctcccgaccactcagaactgattgctttccagacattcacagagctaggttgtgacgttgttccccgactgctaggctatcaacagcgccagcaagaccacgacgagggtgttcctgggggatacatcacgtatattctatgggaaaaagtgcccggcgagtctcttaacttgaccggattctggaggctatcctttgccgatcgccaagccatccgcgataaatttcgtcaagtctatgagtatgattgattatctagtgaccactgcgaaatattgggctaacagagagcagaaggtttttgccgtgcgggtacatgccatgtatggctggtccgtcgaaaatcatttatgacaagtccagtggtcaaatgtatgtctatgcaagattatctatggactatgatctaactatctctaggcacatctgcgggtttaaatccgcatctccatttgacgaacctcaacagtgggatgatgttaactacttccaatacggattaatccaaccctccgatagcccgttctactgggaaggaacaccacccggaacggcggattggatcaaagatgccaacggctggacgtggtgaatatgaaagaaaaaaacacagcgggatacagtatgaagtattatctggcttagtagaaaaacgcaaagggattgttgttggtgtaatgaaggctgtgtttgctatacacaagtatgggcagtatactatgatcaacgtcatatggtatttaatgcgaggattggaaatcggcccctgggtttcagcaatggtagcaagatacgactaatgatagtctcatttattttcatgtgtggtccgaaggccataagtatacaaaaagcccatgcaaacacatgtgccaaatccagtaaaaatataaagaacgagcttacatcttctgaaagtattcatcgaaatcatccgcagcgactttagcgcagtcaaagccgtagatctcacgctgcacatcggcatcagcccacttatcaggcacaggacccttgccagcgcggagggcagcaaactgcttgtcacgctcctccttggcagcaccttcacccaagtgcagggcacgaccagaagcggtagccatgtcaaccaaagcctcagcacggctcttgcggactctctcgtaaacacggagagccttgttgatagactggggagtggtatcagggagtttggaaagaaccacaccgagaacagctccgtcttcaatcgcctgggcagcaccctgagccaagtgcggtagggtagggtggcaagcatcaccaaccaaggcgacagagtcgagaacccaagtcgggagcgggtcgtggacgcgcagcttccactcgcagacctcgccctcgggaacgtaatctagcaggcgctggaccatggggcagaagtcagagaagacgtccatcatggcaggcttggagcccttggtggtataggtagcgtttgtcgcagatgcgaagtggctgtcgggctgggtggtggagaggttgtagatggtattgttagagacggggtaggcgataatatgacgtttttcgccaatccagcgggtcacacggttgctgtttatgagggctaaaagctcggggtcgtctttgatttgctccttgtggatcatgattcgatacgcggcttggtgggtgtccttgacgccaacgtcggcacccccccccctcatcctccccccccgnnnnnnnnnnnnnnnnnnnnnnnnnnnnnnnnnnnnnnnnnnnnnnnnnnnnnnnnnnnnnnnnnnnnnnnnnnnnnnnnnnnnnnnnnnnnnnnnnnnnnnnnnnnnnnnnnnnnnnnnnnnnnnnnnnnnnnnnnnnnnnnnnnnnnnnnnnnnntgctcgggccggccgggccggcccccccccgcttcatcatctccacgcgggtggcactcttaataccgtctgcggcgagaagcacatcgcactcgaccttgaacggagcagctccctcggcgcggggggtagctgtgaatgatggccgaggaccgaaagagtccacgtcatctgcgctgactccgaagtggaacttgatttcgggatgttgcttgcagccattgtatagtccattggatagtgatgcacgatggccaaccatgtgcttatatccatatgtcttttcaatgtaccgcagatccacatatgcgtgttgagtgtccgttgcgccgtctgcagacatagattagatcgcattacattgtttggttgggaaatcgcaacataccacgaactgatgtgtcctcaatattcacagcctcggcctcaatgcccttccagacaccgagtctatccaaaatgcgggccatgttcggtgctaattgaataccagcgccaacaaagccgaggtcagttgcgctttcataaacatcaatgttcttaaatccctgctgtgccagagccaaagcggaagtcaaaccgcccattccggcgcccagaatggcgatttgtaaatcttgaggtgctgttgtcattttatcggtggtgtgcgaagaagatatatagtaatgggtgttaacacgacaaggaactaaaatataccaaaggaagaatagcaggaaaagcagcgaagaatggcacaaagagtccctttaaagataaaatatccaacggtgcaatgcccgggtgatgctgccgaccatgtcttgcattttgcttcatggccacggcggagtaagtctttcccgcctctcccacattctccccacaagcccgttttgaaggcgctcacacggcttggggatttcatcattccctgcttggactttatccgctttaaaatttgatggcaatgttgtaagcgggaggctatcccgatgtcaacgtcaagtgcagctcatcgtcgtactgcagtcagccttattctcatggccaaatcagcaggggttttagacccacagctttgctttgttcctgcttttccttatacgattaacccaccctgaacaaccttgatatgtgtggaatcggtgtcgatgttcacctcctattctcagctccaattctccatgataacgaacatccttccccacagtttttaactccggacttaccccgggccgctcatcttgcggagaaagtctggttgctgaggctacaaactgccgataacttcttgttggacactgaggtaagaataaacatctgacaatcgaatcattctctgatatgagttaacgggaatggccattgcatgaaccgcctaagattaactacaacaagaatactcggccgtgtttgcggcttctgtcattcaaaacgacgtgatccagttagtcttctcagatctctgtcttctcacggtcgttaatttttataggcaaacggccgaaaaagagaaaattaatttgcgaaacgacttttctgtatgacctttgacttcagtcatggcttatttgtcaccaaacatgtggtctggaaacgtcgctagtaatggcgacacaatgacgtgcggtctcctaaccgtcggtagaagacgtgatagatcaatgatacagggagagagaggtaaatgaatatctatcaacatccatggatggtaaagatcgcatggcgaaggctcacgtatacagagaatcaaggaaaggactagaccccactcacagtagtgcgccatgttgggactagcgcatatcgaagtatgagtgtatgtcgtcgtgtatatagggaatagtgatcaatgagagagttatgttcccatggcacacttgtagagaggacctgcttatatagctggccgctccgtaactggcaaacaacatcacgatgacccgtacagtcatggatcgtatgagaggactggcggacttttgtttcgcgagtctcctcaaccttcacatattcttttgctgtattaatccgttattttgaaaaaaatatgggactttccgggggcatattttcattactcgtcaccccctaccaggttaagaaacgattttggcgagctcaagtagcgccttgctatcgagttatttattgccgagcacgctctgcgtgaacagacgcagcgcgaggaaacgctaaaccatagagctatagctttacaaaaggccatagctatcgatcccgatcccgaccccgatagaactcaacttgaaattagagaagcagatgaacagctcgaaaaggtaaaaagacaacgtccaaaaaaagagcaaggcctttaccgagcggtgtccatgcttagaccgacttggagagccgtttatgatagcataaaggatgatgatgatggtatatggtttatgtgtgaagaaatggttcaggattgctcggatcgaggcggatgttgtagccgggggtgtggatgctgtgcacggaggaggcatctctctaaaggggagaaaggcaagggccactgtacttcggagtgctggtgctgtatcagctgccgaggcttcgaccttcccgaggaagaaaaggaagagatcgcaagctatatgaagcgctggcttgaggaattttcctcgccttatcttcttaatatggcaaatgcttttttctgtccattaaagccgaaggtaaaatcaaagccgaaggcagaatcacagtccacgttacggagactatttgaaagagggtgaaactgacgttttaagtctcatgaaaaacatactttacttcagagatatttgctcgctatatctccccttagcaatttctcggttacttcggcacgacccaattggattatgtggttgtctagcattcaaataccgtttttatcattgaattatctctaatattggtggtactcgaattaatatggatagcttcatggtgccatatcatggtatggtcgtaagtcttgtgtttggttgacaagaccaacatgatgaagtggacgtggccctatatgcgaattcttgacgccggtcagaaacttgatcctatcgtatataatatcccgttactctatatgcactccttagaaatttctagatatacgagatcttcacctgattggcaagagctattaatatctccattgaaatgtgattgagctgcccttactgcttctatcttttttccaccatattttggaccgcgctgtttccggacgtattcgtgtctgcaggcaaacctggtccgctggcagaagccgcaaggtaaaagtccgttgcagcgtatgagtggcacggtacttttttgaacaacatcgtggtttcgtcttcatatacagacactagtaagagatccaaaaaggcggcaagatggagaatttgatctcaattctttcaaataatagaaacttcccatgaaacggactaatatacaaaccaacgtaacaaaatacaaccccccaaaaacaaaatcaaaaccaaaaccaaacaaaaatccgggtgccgaccctaatgtataaaagagaaaaggcagggaggatgggaataagcggatccactattcatgtgggtgtatgatagaaagtagcggcaaatacttctaatacctatagaataccttagtaacctgattttttttttatagtagagagcaaaattagactagtatagaaggaaaaaaatccggtgaggaccagtattatttttcttagtataatatataatgaagagggaaatgcacgatgggcagcctggccatgcaggcaagacgagaatgacacaacaataccaaccatccaggacggtcagctagtaagcatagggatcacatagaccacacatagtatacaatcgcctaatgcacaaacatatcgccacttgcttctcatttctggagtggtgatctgattaggttcctctctctccaaaactgtacttgacaaccgggcactcgcttttctctacctgaaggataaggtaaggccactaaacgagggattccgattttccccactgcaataactagtacataattagatagaggggtaatatctgtctataaatagtagctagataatctaatggttagatcttagaaaatacaatcgtcgcggattcgaatccaggtccgattaaatataatataattaaaaaagtagtagtatagtaaaatataggtaaatcaaagcacctaagtacctttagtagtaaacttagatataaaaggtaccttgaaataataagatatagataatacgagaaaagaaaaacccaatgtttttatatctactccgtataataccctcctaatacgtattggtagccaatacgctttgtctagaacagtaggacatgcagaattttgggaataccttttgggccgcaatactgtgttatgaccgtcatactacagggattctgatcaagagacccctccttccaaggaggggcatattaccaatcccctctcccaaataggtatcgaaactatactactatcatggaagttcatgtagcatatggattgtcaccgctagaaattctgaagtcattttccgccttgagcagcggataatttgcgtacttctgcactgccagatccaccttctcatattcttttgtatcccacccaacttgccatacatttcttcatctcaagcaaacttgctgctatccataactaacctatcacttattgttttcacccataccgtgcacatatttggcatccgaacgtgttctaacacgccatggacctcgatcatgctctgtctaccttcatcttccatcacatattcttccccatcagactcccacaagaagctgaacatgacctagttcagctggagagccgcctgatcgtggctgtgagagatgtgctgcaagatttcattcagaatgtcagccccgagtcccagcagcgatgggacctagctttgagtatgttgtttacctggatgaagttgcataccgagcagggaattttgcagagtggcttagaagaagctctttcgaaccttaaatttaccagtaagtgggttgtgttctcgttagatctttctcccctagcacattccagacggccccggtcgagaaaacgctgacctaactaggggctattgcatgtcacatcagagcccagaactgcggatgggtcgccttttacgatgcagaaaaagacagggttctcgtcgacgcatttgaggtgtcatcggaggatggatcaatactgtcctcctctggtgggctcatacgtcgattccccggagttggtgtagctatctcggcagacaagctgtctgatccgacattctgctcctatttggccaccgaaatatctcaattagcatccgaggaagtgcctgagatgctgccgaaaagcaaaaaagcgggaattgaagtggacgaaatccggaacacaacccatcctggcctggtgacagaaggcttgatgacacaacttctggcacttggtacacaccatgaagaaaaaagggttttaaaatgtgtgcgagacgaggtaaactggaagtctgctttattaccatggaggcggtctccagcttggctcgtcatccgagtcgctctgcagttggttcttcggcgatgcttcaatgaaacggaagggcgccttcattacaaaaacttcattctgtacttcatggcaacactggcggcaagacaaaatccgtccgtagcctcccatgaacttgtggattgctatgaaatcatgcgtgctcggattggccggcggatctgcaagctggaggataaagatgaagtcttttcatttgttgccaaccgtgcacactccgcaagcaaggatctgcttgacagattgatgtctattaaaaagcagatcaaaataaccaaccgcgtgaggattccgctgattccatcatcatcatcttcgcaagatgatgttcaccaatcactgcttcattgcaaggaatatcttcaagcggcgatgcgttcgtcgcctaatcaagtaaagcccacaaagttctgtcgaactcacacatccaacttgaaatggagcaatgacttgcccattccgaagatcgggtcgatcatggctctcagtgaatttgagcaatgggttgatgggcacctacagtcctggttcatcaatcaacctgcttcgaaacatgaagcagcgtgtcgtgaacttgaaaataccattgcgcagtacttttccctcgcaaagccgacgtacatctccaacccacaagccacgtcagtgatgattcttgtaatgttggaactgtgggtagtgctagacaaaatggctctacgactctgtcccctgatgaagaggttctctcctggaatccccgataacttcctcgaacctctactacttcccaagatcggtcaaatgaaacgggcgagggaggtcgagcagtacataaatgtgcggcataaggaatcggacaaaaccaaccctagcatcttctgtgacccagcaccaaattgctttggtgttcaatttttcaacagctccgaggaacaccaaatgctcgaatgcagaattgagcagtctgccaatgcaattagagcagcaaagcaagcggaatgggagagattaagtgctcaatacgaacgcctacacgaacaagagcaacaaatgtcgcattattatgattacaatggcgatgatgaatacgttcaccttccgcgggattgcccaaggtgttcactgaacaaacaaatcgaatctatctccattcgggttcatgaatggccacttccaacagaagatattgcacgaaaaaccgctgtattcgagctcagtattcccatttggtttgcatcatggcgcaacagtacctggagagttctccacgagcttggacgaacacttacagtgactactaccgatatggaagtcagatggcttgaatatacagagatccaaacattcgtcacgagacgcgagtcgaacattgttctggcctcatatacaaaatcatggcggaagtctcactacagatcgcacagattccctgtttccttcgattctgtttgcatcccaaatgcgcttcgcctgcgacttttcgacaacacaagaattgcctgggtgacaattcagaccaataaaccgagcgtcaagagcatgtgcaccatacaactcccactcggagtgtactcaaatctgcaatacaccctcaattccacttcacactcccagaaccaggtcatagcgacccagaaagactgcgataaaaagctcagcttgctagaatttgaggcttacggatgtcttcgctctggggaaaatcttcaatggggcaatattttgaggaatctggcatcatcggcattatcactgaatgaggaggctgttgtctcccttttcaaacaagccgcttgggaactggggccactatccggaagattaggctcaatcagaagagctgcacatgaagcctttgaggatataggctttggtgactgtctgctgcacctgttgcgagagagattggtgacgattgaaaataactggaacgaatattgcaccttcgatcttattgtcacacttggtgttcgtattcttgctttaaaaagtggatcaccgtcggttgagaaggtcgttgaattcctacgacaatgtcgggaggtggcgatggattggtgcgatcagttgaatcaaagtcttctgaataaagaagagaacgacgatcaaagacaacaacagctgctacttctgattgcatctacttgccaagccacgtatgatgttgatcctatgtttttggacatggttatcgaaacgccccgagacctcttttgtttcgtccgatgctccattttactgttcgagaactcacctccagaaacagacggtctgtcgcccaagataaagcttagcgtggagaattcagaaaggatccggtcactatcaagatcacggataatatggatgattatgaactgcgcgtctggattgaatgaagcaattcaaagtggcatgaactgtcttgaagtttccgggctttggaaaacttgctcggatacctgggtaactacggaaacaagcaacagtgcgcaaggctttgggcagcgactccacttcaattatctcacaggtgaacttcttgtggatggaaatcctccagggaggttgccagctcgctttgcgaataatactctctaccaacgcctcttcggaacggtaattctacctaaaaccttcatcatatctagaagatgtattgacttttctatagagagttatcccggtgatgccatcgagtttgcccggagcatcgtttgtcttgtcacacaccgttgagaattttgaagtaagacttatacaacccaaaaagccgagctacgatacacaatctgacaattgataggttcacttcgggatgcagagtgggaagcttttgatcaaaacccgcaaggggtctcaggtcttgcagcttataccacacgaggtcctcgagaaggacttccctagagtattaatctccgagaactttcattggctggatttggagactggggctgttgaattccgtccactgaaccagccatggaaaccttctgaccgcaattggcatttgttctttgattctaattcgccgggcaacatgctcatgcaacaagattccaagaccctagtcgatgtgcagagcccgcctttccaaaaaattaatcacatattgaaagtccttgatgcaagtgatgagattgtcgtcattcggacggctgttggaacactggaggcagaactaagccgtttacggttgaaattcttcgtcaatgataatggacgtgtaacgtcaaaggagttcggcgccctgattgatgtggaccaagacatcggctgtttctatggactgaagaacaaactggtcctcgttgattcctccaataatcgatcggtcattattccttacggaaacccgatgattagtagagaagatcatcatgttgcagtcacaatcgatctaccaaccggaaatcgcgcgaagtacatgcattatttcttggacagtcatctacaagttctgcgaggatttcaccctctggctatcttgtaccaggcgtacttgcacgcaatcacgtctttccctgtccctgataacttgactcatcgctcaggtaccgaagaggctatccgtattctacgtcaggagtgtttaaaatcagcattccctcttcaaaatgatgctaccgagaccctggaaaggattgcagcacttacgccgtgccgcagattttatcctcagcaccttcgtgtcatgcaaactatcgtatggtctagtaacttaggtcaacttgcccaacacgatgacttccagtccttgtcgcaagagattcttcagttctctgagcagttttcacatttccatggtgccaaaaagaaggaaaactgcctcttatacccggggagtattgatttgttaaagcgtaaccgttgccgcgccgagcagatcatgaggtcgcaattcagcgaatcccccactccatcaaggaagataaattacaactcccgcgattgtaacatcacaagtgctcgcagtcagaatgtgtatagaatcgcagctctgattcgagattggcctacgacagttggtcattcatcacatctactggcaaccatgaggcaattcaaaaacctagcaacgctctcagctgattttacccgttactcttgctctcaaatgctaaatcagtcgatggagagtgcctgggtgggtttataccacgcctgccagacaagttctagggctacgcacacctacttcttgatttccttgttttctatccttgcgtttggtgggaagattgaccagtcggtcctccgtcaattacttcaggttgctttctcggagaaatgcaaatatattccagtgccactcaactcgacgacggtactgaatctcagccttgggggggactttgttctttctcaaattcaatacgcaatcaatacttcctacacaaccttcactaaggtatacaattcacacctctcacgtgcagaacaagccaaaatcaaccaagaagccaaagccaactggtgcaaacaaagggccgaggatgtacggttgtgtggggactatatacgagctcagtggccgtccaaaactcctgtacttccatctcatgctctggttccactggttcgtagaaagccggcacatgaaatgatacacatgctttgtcgcgattgggtccaaaaccggaatttccttgacttcctgcgccgggtacagaaggaagtgccgccctccgacccttggtatcacgatatggatcctgttcccacctcccctgtccactttcaggagattgaatacagttcatttcagccaccctgtggctttgatctaatgcataggtctcatccagacccccctcagactccgtttgctccgatgacctatcgcggggtttcttcgatcctgcaatcaacacctgagctctggtccctagcaaagcatttccaagcgagctctaaccaatgtcaacaagagtatggaaacgggctaagtcaaagtgtccaagcgttagaggacttctcaacttcagaatctacgcctggtgaatctgaccttgctgcctcttttgactgggtgacaaacggagatgcggtacttcgacatcaagaagagcttgaaagacagagagatacattgtgggatgaaattgtcgcgaatttaaggacgagtgcaaatacaatttggccagatactgacaccgtcagcccttctgtcaccgtgtggtcagttctgtctattctggcctctgataagtggaccagcattcccatccagtggaaggtgttacttgtggcatttggaaagtccatctctgccctgcgtcgttgcgagagactgattgcctgtaccgaaaatcgggatatcgatggatttctcaaagaggcagaaaacccgggctatgaggggtgggaccctttgaactacccgacttggctgctgttggaaattgaaaataacattactatccggaagcgccaagttgaagttgcagctcggatgattaaaccggactgtggtgaaaacgcagtgcttcagcttaacatgggcgaaggcaagacttccgtcattacacccatggcggctgcagtgttggccaacggccatgatcttctcagaataattgtcttgaaacctctcttaaggcagagtgacgcgctcctttctcagcggctcgggggtctgatcaatcgacgcatctaccacattccattttcgcgacaaacggaactttcttctcccattgttagccagctccagtccttatatgagcagtgttgccgccagaggggtattctgattgccctccccgagcagatgctctcattcagactcataggattagatgctgtggagagaaaccccaatatcttctcgccactgatacgtcttgagaattggctgcaaagcaagtgccgggatgtcattgacgaaagtgacgaagtcctggatgtcaagttccaattggtttatactatgggaacgcagcaatctctcgatgggctcagttgtcgctgggagacgactcagaatttgcttcgcctggtctccatacaggcaaagcgtctttgtcaggatgatccaacatgcatcgaggttgatcagctaggttaccggtttcctattttgcgatttctgaaagtcgatgcgatcgaacgactgatcggttacacactcaagtcgatctccgaaaatggaatccccgggttaccatttacccaatggaattcacgggtcaagagcagcgtgatgcgattcattgaacattctgaacttgccaaggacgacgaatctttcatccgggaagaatttgacgggagtgtctttatgaccaatcttctcgttttacgcggactctttgcttatcgcatcctgcggttctcgcttgctgataaacgttggctagtggaatatggcctccacccttcccggtgtttaatggcggtgccataccgtgcgaagggtatcccatccgagaattcagaatttggacaccctgatgtggcagtgactctcacctgtctgagttactactacgatggactgaggaaagagcaactgagggactgcttcgtgctcttggccaaagaaaatgacccttcaactgagttccataactgggtcacgcagtgtgtggatgatttaccagccggtttacggacatactcaggcgtgaacctcgaggacgataagaccttcacccagactctgttccccattctccgctatcagaaagagatagttgacttctacctatctcggttcgttttctctagagaagcaaaggaattccctcggaagctctcgtcatccgcgtgggatattcctgcacggcgtggccttcaactgacgacaggcttcagcggtacgaacgataaccggtttctgctacctttgtcaatccgtcaaagggatcttggagaacttcttcacaccaatgcaatggtactaggcttattgctgcgagaggacaacaggcaatgtatcctggcgcaggatgaggagggccgccagctagatgttgatcggctcctgaggcttgtagtcagcaccggtgaaggctcacccacggccaagcctgtacgagttttgattgatgttggtgcccaaattttggaggccgggaatcagtcagtcgcccaaaaatggcttgccatgaccccggagggagatgttgaggcggcaatattcttcgaccaaagtgatgagactatggtgattgaccgggaggggcatgttgagactctcttctcgtcttcgttccgacaacgaatgggggcttgcttggtattccttgatcaacaccactcgcgcggtgtcgatttgaagttaccacttgcgacgcgtgccgcagtcactctagggccgagactaacgaaagataggcttgttcagggtaagctgtgaagtccagatatctttcaaagccagtactaacttcctctcagcctgcaaccgacttcgtggccttgaaaaatgccaatcccttctatttctggttcctccagaggtcagccacaatatgaggtctatattggggatatcatccgatagagttttcacttcagcagacgtactaaagtggtctatggctcagacatgccaggccctggacaatgtacgcccgctttgggcaaaccagggacttcagtaccacaagaagatcattctttgggatttaatagtgggacaaagtgacccctccacgaagtctaaaaccgctagttctatacaggagcctgaagcccggacactctcccagctctacgcaccttgggacgaggataggcggggtaggaacggccacaagatgcctgaatggaatgtcaacaatgagcaagttcaggagttgttgaaaactttgcagtcaacttcaggtcatatcgcgacttctgcttaccttcatgaggaacaagagagagaaattgcatgcgaggtggagcgagaagaacagatttcacggcccccatcatacgagcctgaagaccacaacctccacgacgatatccggtatttcgctaatttcggcaagttccgtgataagaaaccatccaaggctgttacattggctttccaaggtctggaaaatacatctgctgggaaggagaaccatccacatctgcttgggcctagattgtattccactgtggacttcaaccaaaccgtgaaaatttccaagaataatgtcatggatgatttcagcaagcaggtgaattggattttatccagtgtccacagcgatgttctgattatcgtgagtcagtacgaagctaatgagctcatcaatatcgttcgcaaatcagagaatgtcagacttaacatctacaccccgcggctaacgaagcccatgcggtcgttccgccaccttgacttctttggcgttggcgcaaacattccaatgcagcctgacgacgcaatgacacggtgtctggagatgttctctgggagcctttacttcggctcattcgaagattacaacaatttccgttccttcttggggcttcttacggataaccttggtggaattccagacgatgccatgaccaatgagggattcgtcaaatacatttcccgcaggcaacttcaatggcctatcgactcaccctttgttgaaaatccgcttccgttcctcggtgccctgattcatattcgaaccaaaggaatgggataccaacaatctcatgtcggcacactcgtcaaagccatgccattgagtgctgaacgattttgattccaagcggaatgttcacttttcttggcgtccaatgtttggaaaagtttctcagtttgaaccaatttgtttttttttttttttttttggcaattcttttgatgtttatatgttgttttgtggtgctggtgactttcaggccttctagtttcgagcttgctgcaacggtcctgccttaggtagatttgaatgttattttatctccttctacttcactctcttatgaatcttccctagcgggagactcggacgttaaatgcatattgtaatgggggattccagtgcaggttgactgcaaaggggcagagcggccaaaggtcaaagtcaaatgcctgaatgtgcctagattctgcctaatttcagactggcagaaatgaaatacgtgaattaccatgacagagggcttgatcataaagagaagggattgctaatttgacacccccccccaaaaacctattctgccctgcaacttcctaatcgggtaccgcttttccctcgacgcttactttcatctccgcgttcgatagttgccgccttctgattttatataccgctttcgtgacaatagtagtaagacagcagatacctaaaatttgtatggaagtctaacaaaatcaagttatatttgtcatagtaactgcttcatcaactactcccatctaccaaggagttgattcctatagaaactaggtagaaagaatatacgattttttccgatgaaactgcatgtttctttactttaccgagtaagccagaagctggcagaatatatagtcgtaccgaatatggaagtcggtactgaaaattcaggtagagtagaataggttgagagggtcaaattagcagtcccctaaagagaaggaaaaaagaaaagaattagaaaaaaaacttcgataaggaaaatcaaaccccgatatttgttattcgaaagtgagaatatggtctcataggctaaaagagatatatgatggaaaccgtacagcgcattttaccactctttacaactagaccataagtaccaaggttcctgtttaaggccctatccaatatcaatgatgcaattattatcgacacatttataatagtatctcactcgcaaaagttttgcacattcctacacattacatccttttacatgctgtatcggccctagcaagttgaagcgaggaaaaccacttcctcttaatcatgaggaaagaacgtttgtattcttattgggaccgtgagcctccatgtgcgtcttgtggcactggctctgatgaggtacaagacggtaagctctacccagttgcaacttgacaattatatcgcaatagatcactgaagatcagctcaatgccagttcgagaatgtatcgaagaatgttatggtgataaagaaatacctgaatggttcaaggattggaaggatgacctttccaaatcatgcgtgttccatataggctgctggagattgttgatacaacatttcaacaacggggttgttcctctcgataaattggctaaagtagtcaaagaagcaccttggccacagtatcgagcctgtaagtcattgtttacttttcttataggtttttgcatccacgagcaatttcaaataatcaatgagaacttttagatcatgtaatcccagacaccgggacgcctagctcgagatgctttcgatatatcgggttccgggccgaatcaaagacctttccaaaggcagaaaacatggaatgtgaacatcctctgaaggatgagtcccaagtgaatgactgctttcgtctccttccactcgaaatccgcttcgaaatcgcctatcttcttccaacgcccgaatacctcagcttaagacttgcgtcgaaagctatggttcacatatttgaaaaccaggaattctggaaaacacgcttcttcattcatcgggaacgaggatatctcaactatctcttggaagaaggttgtggagactggagattaatgtaccgctgcactagcagactcaagcgtctagcccggacactacggtttcgaaggctacagtggcttcataacgagtggatcaaagataggtgtatgatgattggagctccaatatctacgtcgcctgagaatacagctcaatttgatggcctagtgtgggaaagagccgcaggaaaagtccaatgcgataggccttacaaatccgaaatcactcctccatcttcactcggcaatgacatctgccagcgatgtcgtggggtgcataacctattaccacctcagatggtcaccatctctagtgagctcgtggaaatcgctgtctccgtacttgctgaagatgaacattcatttattaccgggctaaaccttgtctacggcgaaagttcaccaagcattagccttggctatcaaatccctcaaaagcagatcaagattgatctccgtggtcagccgttgaaaggcttcgaagtcctcgctggcgaagggggcatccaggccatacgtccaatatttgaccaaaaacatggaataagccgtagcatgattggaaagccgaatgcaacttgcaaatcagtactacttaacccagatggagagataaaagcctttgcggggtatttcgatgtaagtcaaatatgtgctgttccaattcacatgcgcagcttactgactcaattgtagcactgtaggatggtacaattttcaataggttcattgcgtccagaatcattttgctgagcagagagacgcaaactaagatgtctagttagttaactaacttgctgagatttacgaaatctcagattctcggatctggcttctgattggtcgagaattttgtatcgacgtgactagggctagtcacgttactaccggccctctataatatctattcatgacttgctagtacctaggtagggtcctattaaatgtcatggccttctgccaattgctaccaatacgaagcgtctatttgagcctatcattcgatcgacctttctctagaggcctatggtatcgagaggaaggctttagagagcttccgggctcgttgcctcttagtaacttagatgtcatgatctaccatagatcgctatcatatgttttatttttgcttgctcgcttattatttgcattgtttatcagtttgcattagatggattgtttgctagacggctaagcgagatgtttgaggtttgcgacgtttgcaaagggacagctatatcaactggctgcctcccactccacatggcaacttgcctcttctttctctccaccctagttattttgaattaaaagcactcttcctctctgagacctggcacattacattataactaagatccccagctacgcggtcctatagtttgattattagcatttccgctttcgtacactgcatagaggtctcatattgcgagtatatactcggcaaaagcgtcttttctcttttaggtagtccggtgacgcgacagacttcaggttgcgagctagagactagactgccccgggacgttcagtagccgtgcgcaagagactgttcggaccctcgatacagaacccggattttttcttttccttttcgaaacccgaatccacctttttttcttcttttcaaaacttccaggtaatggtttcatggaatcatcgtgcgacaaatcatgctggcaagactgagaagttgacgttgaatctcggaaggtggtcttgcacgaatagcggcatccaagtgtcgtaattagttgaccggtaaactgactctagatctgggagaggatcttaatgttttggcggtatgtaaacgaagagataagttggtgttgagcctggacctgttgaatgttgaaagtttgaatttcgactagagctgctgaatctcgctataaaggttgacaaaagttatagtgcattcagcgcgaagctctggacgatattggtgatccattttgacgaagatccagaagaggtaggctattttttcaacatagatattaaagaggggaccctgtgacggggtcaccagggataccgacagccctgcctgtgaaacaggtgtaagagcaaattcaccactgggagtggtagggtgcttgagaggacaacaccatggggtgactactcagaagagaaggtggagggtgtttgcgttcacttctcagtctcgctagcatgatctgtcgcacaattatcccaacttacacataacacaacaatacaatttttgatcaacttggcgtgtgcacgacaactacaacaagattcagggagaccgtctccctttccaattcgcaggacacattccaattgttcattagcttacaaccatatctctatctctcgttctatatcattccccttcaccgaacacatgcatttttttcttgtcctgcttccacgtatctccatatactaaccccgagatctataacgcttgatcaagccaatgaacgccaaaaaaaacccggtatcaattcctctacatcctcctactccttcaaccctactcacgaataatatttgcatcgcctcttggccttctttcttttgagcttctcaacccgcctcgcataggcacggctttcacggttggaaagaaattcatatctttcctacaaccgaacgaagccgtctactttactcctagtttagccccgaaccattacggtgtttttctgctattagccttacgccagtttctccctatcaacataatatattgaaacccttcaatgtgccagtctggagcttgaaagttgcctgctactacacatttatcacatgcgacactgcccccagtgtttggcttgagaataccccgactgccattgccaatcatcctccggtttcgactcattctagtactcctagcagtactgctaaagtgagctccactgtagtcgctactcctacactctcgttcacttactgtctctgtccctgcagctctgtcctctatcgttactggcaatttgcccacagttgcaccgaccagtcgattgtcctccgttatacctgtggattcctcaccacctgttgtcgcaaacgcgcgtgcattctttatcattctgcatcagcgtaactccattcaaccgcgagatctgcagcgctttatcaagccaatgaccaccaaacaacaacttgatagacattactctattctctcaatatctcaactctacaacagctctcagcgagatggctgtaagtccatgagtgcttcaatgtatcagttcatgaccctaatatataagtacagtaccagacacagccaataatagcttcctacatagcgaagattttacctgggacccgagaggttgaagttgaccacctctggacaaacctcctcgcatattatttcccaaccacgcaaacctacggcgttgaacgggaagcctatatccgatctaggtcgcagaccagggcgaacgtttgcgtgagcacgctaagtgatggtaaaatgttcaatgtgattatagtggagaagaaaaaagcctcgacgtcacgaagtgctcatccaacgcccggttcttggactcatgcagagggacaactactaggctacatgctatcccgccgtgacaatcaagagaaagatcttcggcgtctatttggaatagtaggcattggaaggtacgttaggttctatcaactcatacgaggaaagaccgagctcgaagattataaagatggtgcgacctaccacttggataatgatggcttagcgattgagcgaacgattttagcgataaaaagctacatcgatagatatcgttgatatagttcacggttttgttgattgtttctttcgtgcttttttgtttccattcgtttacttttttaccttttatctgctgtcttcggtctgtttttttttatctttatggagcttattattaccattttgtttcgggtgctctttatagagtatcgtagtatatacccgttgaataacacacacgaattcgactagttcaactactcgattggccacacggcaactataggcagttctgtctgtgggggctataaaaccctatattaagcgctaatcatccggaccttagtagatcctactggaccagcggtactagaaatacatttggcgtttatttactgattataagtagctgtactccgcaaaaggcgcgggcttacaaaggcgcgaaaccttcggtcctgcctttgcaggtcgactaagcggtcacgtgatataaaacacccctgaggcacagatacttttcacttctttattatgagaaagaccttggtcaacttttcatttctgatgtctttgcatatctgtagggagacgtgacctcctggtctgctcccaacaacactttcatcctcatacaaatgaggtttcccagagcactccaatagtcaagtcgtcttctcaagatatatccaacaggttatgacctatgctattgaatcctctacatacttgcaagcttcaaatcctctatttcctccaattggtgccctgcgtcgcatactccacagtggggctctgatcccacaagtcagaatttccacgatctctattggccgaaatcggcacgtggacgtacctctcactttcaattggttaactgttgtctccactggccgttcgttgatttgattcgttggccactctatttttcaacccaaaattgtatgttttgtttgcactgcggtcacgttagctttctcgccctaatgccgattcattgaagcggcatatgaagaaatagaacaacataatatatccacacttacatggttgcgtaatatcgcgtgatgaactactcaactaaagctcttgaggggacactctcagcttaaaatagactataatacaaagtccaatacaacatcaaccgatttctcgcacgcagcatataggcacgagaagctgggcgaaacagatggctggattacttatgtagtatcgaaaatatctgagcttagtgagaatctttcctttgtctatttgactgtctagatttaccaacttgattcaggtaactgttgtttttggtgtcaaaatctttgttctttgtttaaagctcgcctatataaaagacgttttccacaagcaggagaatctgacttacattaccgtcagttaccgctcactccattactaaacaaagtcctagtgtcgttgtgctatataatatatgatcattcgtgtcgttggattggatatctcaaatatgatattaaaggtgcatcagttcccttaggccctagtgtgagcttttgccagctctcgacatgctttgcttgccattttttcccttcttcctttcaatttccatctacattagccaataaccgcacttccccttcttccttcacaactgccctcgccttatatatgatactagtgtatatgccttgatcatgtgagtctacaggcccctcacttactgacaacgtcaactcgctaactcactaagctagcctagcttacggcctcgctcccacaatgacgtctcgcttcagtcaatctccccagtgtttcgaagaagccaacccccacgtcgcgtgcacaaacaataatcgagaccatatactgctagcactcctccaacgagaacttgatccgtaagcttctgtgccattctcgggtcaactgcaatccggtgtgataataactgattgtcagttgatttttcccagtagtgtgctaacaagatatagaaatgcccgaattcccacttcggtcgttcggtgattccgagctagacatcctcatgaatctccgttatcgaaaagcgcgatctatctaaatgatatttcgagtgttcggagatctaccaccatgggaacttgacttttcacatttttccttttctgcaaacagtctgcgcaagtcaccgtcatgtggatagtaactggaatccgactcaagcgaagttgacattcgatgtcaagattgttagcagggacaagaaaatcggagagcttggatcgggcgtcttcagcttgtcatgccaggtagacggcttcctagagtcgaaatcaacctttcgagcacaatcaatcctcgaagcaaaagctctaaggcaattaatccatgaaccgaatgtctattggcaggagaccaaatggttagccctgttaaatgcgcatcctgagaagagccttccgaaggataggtaagcatacagactgatatcgctatatttgagtttctatactgatatgactattagtacgccgataacggtattcatctcacaccgttgccgaatgtttctggcctttacctcttataaggacgggtatagacaatataatagggtgattcgggaaagcgcttcgtgaagcaagacgaatttatcgaaattcaccgatataatccatattgtgacgatccgaagatctaagaacatgggtgtcgggaacagaaggtactcgtcaaccgcacttgcctggtctgcgttgcaccttcctcaaacgtaagtgaggaacaccctttgcatagcttgcagagaaggacacgcacaaaacccaaaggaagagcacgtagatagttttccttctcttttctctttccgtacttagtatttggacagaaatgcactcttttcctctgaactgatctggcaggtaacacgtatctcatcattaagaaggaagacgcaccgtactttgccaagctagccctagccgtcgctctccgtacgagtaaagaaggggacgaaagaatctaaggctcaaagggcatcaattgtgatacattcagttctcggctataccgaagcgcccctctttcgtaaaaattgcccttaactcggtgctataggtctacctgaggtctacagaacggcttcatgatttcgacgctcgccgaagagatgaacgtctatatacggattgagtcaagtcgatacccccgagcgataccccgaccgaagcaaacaggcagacatgtcgtggggccagtccgtgtgttgagggattttccaacggtctgaaagcagcatgggtcagcgaacgcaccctgtcggcctacttccagatgaagtcaaaatcccctagtaagatcccagacacagatcgggactttttttgacatatgagtaaagcgaatgagacttgagcaatcggtgcgatgggtggaatcacagtgggaataatggaaattaaacttcagtcagttagtcgatcaagacaattaaagtagtaacattgttatccaacaatgaattgtgcccatcaacctcgggccaatgacccgaatcgccactagccgtagcttatctcctagcgtcgggccgaactaccaaaaagcggatagccaagaatcgaatgacgcgcggctttctcgtatgttataggcctgtcgtatatgaacgttgctttttccgctcatgcagcccgatctgcgatctgataaaagtttccgaaagagtcaatttcttcgcactgctcctaccagagtaggctctcatcaagaatgcgaccacaatcgctcctcccgatactcggggttctagccttatcaaatgccctctcagcagccccaaagaacgtgtcgatcagcaatgagaatcacattttcaacgtcatccaggactcaatgcgtcaatggggatcgtctctgcaccacaatggcgtgtcattcttcctcgcggccgttcccgccggtacgcagttctaccatggaacctccaaggccagtccagtgaatggcaccgagtggttggcgttcgagcccgaacatgccatggtcttcgcccggccccgacgtggccccccgccacacctaccacccagtgatgatgatcccgagccagaggatggcagccatggtgagctgcggaagcgtgaacaccatggcccgccagctggtcgcccgccgaagatattcgatgagaatgagtccgggtatctgcatacgtatgctgcagccaaggatctccgccttctgtatcttgacggtatgtctgccgccaagacatcgaagggcacgctcgattctcaggatacggttctgttcaacagttcgttcgaagaacccccgaggggtggcgggcaagagtacgaacgcgccagactggcctgcgagatggccgagaatgaatgggaaggtcgcattgacggtgtgctgcgcatggaagctggctttgagattatcctctgcaactttgagcgcgatctaactacagtgcgaatcacgcaggtcaaggaagacactgaggaacaccgtggacttaggggtaaccgtgaacacggtgaccgggatggtcctcgcagagagggtgatgacaagcaccacgacggtcatggcggaaggaaggacgatgatggaaggcgacacggccccggtggccccggcggtccgaggggtcctggtggtcctggtggtcctggaggtcctggaggtcctccccacggcggacctggaaacgggcccgactcgtcgcgctggatgcgcgcaatcaccgcacgctacaacggaatcggtgggaatcgagtgtcgctgaacttcaaccacttcgtgacagccttctcctacgacgtagaactcttccaagacaattcaaccctgccccgacttgcctacctctctcccgaggagcgcgctgctatccgtgccgaagtcacaaatctggtcttgacgcatcgtcctgccgatgtctccgaagattggcaggcgattacggatatgatcgtgactcggtacggcgatgagctgtcttactttgcttccggctggattcactcaattgagcgcctgcagtccgagattgagcgtcttctgtcgccgttcattgactacagtgcgcgggatgatgtcgctgagattgagcgttgtgcaactcagttcttgccgccgttgtctttgaagagtggtagtatcgcggcgcatgctgtccatggtgttgctcaaagaatctgctcgtctctgattgaggctgggaaggagaaggagcttgactctgcggttcaggttcttcgggatctgatcggttatcttgattgggcgacgtggaaggagtgccggggttgtgcggcgaatgagatttgtgtggtgcctatttggcccatgggtacaatcgaggactatgatagtccaaagtgcaaggatgcatcaaatccatacgaccatcgtggagagagctactggggtggaatgcaccactgagtgacttaatgtggatcactagcctttgttttagttcgggttttcgaccctcttccagccagacttgagatttgctgtttggacataattggtttatttcaggcatatataacatttgttgagggtatatacagaatacagaacataataatgctcaagaagtatgtagagtatgtagaagggattgaccattttgttcgtcattgttgtatgtggcagttccaaagcaaatcacggagtgatattccctttacatataagaagtaaaattggcaaatggtagaaaagaaaatcagatcccatcaacgggagaatatttactggacgagaccacccttggcggaggagacgatggagccgacggtagtgccaacgctgccaaggccgagagtggagagaagtccctgaacagcgccgtcaaccttgatcaaaaggacggaaaccttatcctcggcgttgacagcaatgaagttagcaccagggatctcgggaaccttggacttaagctcagagacagagggagctacggcgacgacgttgccgatgggaccctcaatggtggacaagtcaagaccgctgaggagaccgacgacagtaggctcaacctggacaagaaggttcttgccaccagcaaggccgttcacgtcagtgatggagagaacgttttgtagagggtcgtcgcgcttgacgtttccagtgatagactcaaggccgccaacgatggagccgagaaggctgccgaccttgtggaggccgagactggagagcaggtcgacgacttcctgggtcagctcgatgagtgcagcgttgccattgtcgaggagggcggtaatctgggtgaggccggaaccggtgttcgtgtcgagcttgtcgacggactcagccgtttgaatgacctggcccactggcttctcgagagcgctcaagggcagcttgctcatcaagctctcgagctcggactcggccatcatttcgattttcgaggttccagcctggttgaggatggaaagaacctggccagcaccggtgggatcaggcaaggtggagaatgagggagttgcggcgacatcggagccagagggaatcatagatgtcatcggtagaggcatgcccgaagggatgacaccggagggcaggctagagggaactccggagggcaaagagccgatggtacccgaagggatgttggcgggtagggccatagccgcagaggccagaagggcgaaggcgaaagacttcatcttgtcgttcaatgagtggaataagttcaaagacttgtttggtacaaaggaatggacggtgtggaccgagattaaagaatgacttgttggtaaagaatgacaagaagaaagttcttagaattcaaacgtcccgacaagacgacccctgttatatacgatagctgtcagcatgggatcagcgttgatgcgagtccgacccctcgtctgttgacgtccttgagcgttctcctgagctaacaagtcttgaaaggggaccgctcatgtcggaaatgagaccgatgggagaatggagcagtattgttcctgtttcatcggccaagacgaaagtaagcttcacgctgagtggctaataaaggcgctaccacacaagattgggtccgacacatgttgctagctccactataagcttcgtatgaggtccatcctcattagccactttgcagatcgttcactcggtgcaggaacaaagcccgggagggttcccactctggctgtcaggatgaggccaagatattgatggaattttcgtctttatgggccaaatgcagatcatttgtgaatcgggaaaccccttggtcaaggtataaaaggaagcatccgcattctagggtaaatttgccgcatagtgagcttagccttcaaaatactccgcactctgtatcatcacagcaatgaagattccgagcccaaatccaccggcgcttgtgattgatcgagtcttgtgcagcgaaccctgaaaagtcaagccgggatcgacatgactagtacaaccgtgcagatcggaatcaccaatcatttgttggtatcctgcgcagggtaacttgagatcagcactctgtccgccagaaaagattgtaagaagaaggttaaacccaacgtaggcaacactaaggtagattgcaatctcattcctccatagtgggtcgaaatgtcaaatagcgcagtggggccgtgattcccgtcagctgcgttgagttctttgtttgcaccctgaaaaacggcaggattgctggtgatgatatcatcgtcgtgtcgggtagtggcaggggatcgacaggggttaccaaagtcgcgggctaacatggatgaaggtagatgttcacacgtactgcgaaggggcagagcggccaaaggtcttggaaccaggttggaacagcttattattagtaagagatggtttagagaaaaagtcccattgtcgtagtggcacgattcgttggtacacggggggagattacaaaatccggggaagcgggtctgtgggttcgcgagagaatcaatacaacttcatttgcttccttaaaaaagagaaaaaaaatggtggccttccccaattttgtgtcacaagtgataggcagatctactcgtctaaaccaaccgcttaacgggatatatacacatgcgttgttagcgaatctcgactcggtcctaccccaaacgaagggaccaggcgggccaacacctgttaggattcctttgttctttgagaactcgccctggctcgaacgcacgctctctcaagttctggcggtcaacggaaggtacagccttgggcctagagactgcaccaacggtcatattccactgagctaagtggggcttggggtgaaataactgcccgttctgttcatcataacagagccttttttaatcttcctagtgatttgattggctggatcttgttgttctcagttaggtaatcttgaagctattcaggtatctgaccttcacccgctctgccccctcacccctcgcatacgtactcctgagtccttactccgtagtgtcacagtatcaaccttccaaagttgtaaatctgaatattccataatgtgaaatgacatggatgtgatgacatggatgtatccagggaagatagtcaggggagaccgtcaaattaaactttgagagggtccgggatctcaggggtaaactcacacgtttggatcagcacccggacatttgttactttgatctgcttctcgaagccagggtcttacagaggaatgtatgtatgttgtggatgaatttggaaataattttatacaactctaccctgatatacatgtgccttgacgaccgtgcggattcccactcggcaatgaattactacttagcaggacaaaatcctagcggctgcggcttcagcaaccaccatgacagcagcttggatattaccggtcgggaggtcgggatggatactagcgtcgacaatgaactgaaaaaagggttagtatcatctttcgagcaacgtaacattctggacttacaaggttatccactccatagaccttggtattagtatcgacaacggaagtgccgcccttacggccatcatcggtacccatcttcgcagtgctggtgtagtggataccagcagtttgagaccccaagatggctgagacattggtgtaagtctcaagctcaaagccagtggatggggcggtgatgctgttgaccatcttctgaataaaagtacgggcggccttctggtcagcagcggtctggaggtagggcgacttcacaataacagtatttccgctggcatcaagtcccaggacaccggacgaggtgaggccgtgagtcatgtacgtggtgatggtgaccacgccttcactagtaggtgcgcacgagccctggtagtactgggtgtggccatcaatctcctccgaggtgaagaagatcatgcggtgcttgccctgggtcagtacaccgctgtgattgcggtagagggaaatatcgctagagtcggttccgttaaggacgccgtcgtagtcaacaaggccaaatgaggcgttggtgttgaagacgatcgagaaaatggggtggtccttcagaccgacaccaacaggcaggtcaatccactgggccttgggaggaacggtaactccgctcttcttcgcagtctcaatctgggcctggccaccaataccagagttccacaacagacgtggagtagacaaagcaccggaagccagcaccacgcgaccatgtggggcaatagtgatgatctcagagccgcccgaggcagtctgcacctcgacgccagtgacctgactaccggaacggaccaagcgaatgactttggtttggagagcaaggtggaagttatctagcttggtagcatcgggtagatatgtgcgaacagggccagcacgcatctggttcttcacgttccaggccgggtagctgtagacctggtgcttctcattcggctgggcgatcatatccaccgacttccaaccaagaccaccgaggaacttggacagcacaccataaagagcctggtcatatcgcttgccgtcggcagagggcaggatggttccagggttgcgtttgtagagtcggtctgcagccgactggacatccttccacttccagcccttgggccacttgtcgtcgaagtcgcgggctggtgggtgaacaaagaccatgtagttgactgttacaccaccgccgagcacacaggcagcagtgccagcagtgtcggtacacacatactggttccagacatcgagcgagccgatgtcagccgacagtcccgggagatcgatgggagtcaatgagtggtcccatgtcagggtctcattgtttccggtggccactgttggtccgacacctcgctcaaggagcagaactttctttcctgcctgggcgaacttctcggcgctgatgattccggaagggccaccaccgaccacaatatagtcataggtgtgattctggaagacggaagcggtggcagctgttgtaaaaacagagagagaaatggctagagagccagcttggaagatcctcattttgacgtgtacgagggaataagatctcactgaaatcccgatctataaatcttgtcgggggagttggccattttaactgttccacaacgagtccgtcacaccggtacagtcgaactcggtggatcaattgttgaagacttggcacgcgagcgaaacatggcgaaacgtggctcgtcgtgggtttaatttcgtcgaatgtcaccgattaggtatagtgcgatcagataagagaactaacttttcttgttcctgaaccagcccactgggtgaacatctggaattttctgggttcttgtctgataatcatagagaaaaaatagcacgcctttgaaactacactatacctttgttgtatgccaaattaggtatgttggccttgaagttgtagcgcttaaagtggcgccgttttaagaagtctcggaccgaacatgcatccacttcaatcattactttgattcagttctcggagtagacataccgaaagggtctgtgttccgctcattcttccgggatagggtttccccagccaagtctgccgctgacgtagagataatcaatctcgagctttagggtatatttttctgaactttgattagtgtatcctatggaagaggcgtcgagaaacagggtactcgatcgagttctctttctctctcagccaccgtcccacatataccttggcagttctattgtagatactgtatgtcacaaagttctagaacacttaccaagtggatagtggatatcatgagaattcctaacgtccttaccaagcatgcaataagcagaattgccgcgagacccacttcgattaatcatgcattatcaatttagggaagtagtaacaacctgagggttccatccaagcaagctcatactttctagtcggcatgtttttctcccgcgccgaaattctgctagacatgctgacccccacagaatggggcgaagctgtcagatatgccatgctgtactccatatatcgtagcagctctattctcgcctttccaggaacatccggttggctcggatcgtatcgcgatccagtgatggtagtatggtagtagtgccgacaataggccgaaccgtgaatttcttttgaaacacatccttcgtttcatatagtaaggggcgaagcttgcaatagtgtcccaagagaatatcggcatatggacagataatcggctactgctaataatgcaggcattaatgtaaaacttgaaaatatgagtggaaggccgcttataagctcgcgtgaccaattcctttgtcgtgaaaccaggattcgagatatatatctccgaagtttaccgtcatatgctcttggtgctatatttcgtgactaaagcattgctacccacgataaattccaacgagtacccgagtttgtgtctggctcaattcaattaacagagaactagttggagacataccctaaaggtgtagcatataacatgacgtcatatgctatgagcttgtggtttgagttgaacaagtccataatcagtctctgactatgactgtggccaaaagattcggtccaagtgctactgacagcaacaagcattaagatattgagggttttgtaaattcccacttgaatatgagacaagatggggaatatgagggtcaacaaaagagtggggctaaccgttgcggaagctcaacatctccaacatcccttgtaccaaccaaggcgagatcacgcttaagatcactctcctctaggaagaaaatggcgggatcagccggccgccttataccggcatcttcacgcactcttctcctcaccttcgacgcgttcggcaccctcttccacccacgtctccccgtccccgaacaatatgccgcgaccgcgcaccaattcggattatcgcgcactgccgtcaccccggacaaacttgaaaccgccttccgggataccttccgtgcacagtcacatcggtatccaaattatggtcgcgcggaagctctccgaggtcaatacggggggccgaggcagtggtgggaggaggtaatcagggggagtttcaagcgtgttttggctgcagagaatggagagacgcgccccggagacccagaagaacatatttctgatcgcatggtggaagccttactagatcgatttgctggttccgaggggtacgcgctctttgacgatgtgctacccttcttccgccgaatgcgcaaactaaaggctgcgcataagtggtcgtttgataggataattgtgggcgtgatatcgaactcggatgaccgagtgcccgctgtgctgaagtcgctggggctgacagttggtgatatgcgcgccgaccaggatcgatcgagtatggatcttcctgggtttgagggacgaagtatcaacaacgatgctgccgaggaacacgttaaagatcatgcagaccgcaacttggacctcgatatcgatatggtcattacgagttatgaggccggtcaatcgaaacctcatcgcttgatcttcgacgtggcgagacggcaggctctaaaggttgcccgcccatggttgaccagcagaaccaaatttagttctgtgcatgtgggggatgatttaaaaaaggatgctcaggctgccagggatgcaggctgggagagctacttgcttcttcgagatcatgttagttacaataaccttgactcgaaggaacttccagatctcctcaagtttgcagataaattggagctttttccataaaagcactggccacagcgagcagatgaacagttgaacttgatcaaagtcaatcatggatcatatcaaaccacaagtgaaggaaatacctacgaagttccttgagctctatggaacatcacttgccctaaactgatacaacgacaacatacgaaattcttgacagaccatgagtctgtgctcctcaccctcgggctttagcttgatgcttcgcttcctgaaacacaccacaccgcctttctctacattagagcttcctggcaccgacgacctggatgtttttgcttctccacaagcacccaaagcgcaatctcgaggccagcctcaaaaatcgtgctggtttcgggtttggttcattcgcatccacgacagggtctattctttcggacagcccacagcaccgaaattaattgaaaatggctgcccgaacggcttcactcgattggttgacgtcaatgtggttgtattgctctatttattactgcggaggggcataaagtaataggaagtaactatgtggtggatatctagatagaaaaattatatccaaagatattgtatattcagttagctattccatttctttgcgaggcttcatcctccattcaggacagagatcaacgactcttttatacaacgcgataccgaaaatggctagttcaggtctgtcatatacacaaccaatcaaaatctcgtacggagtacaccccgcatatccggtacggagaagacaccgaactgcgcttggatctccgtcctggttcgcgaattggtcctgcttcattacctcaatttatcaaagtcttgaaactcgacgcagaagtcccactctgctttgacattcaagatggaaggggttcaaaagccacaggggtctgttgtaatcatcggagctggtactcaaggtagacgtcttgcgcacatggtaagtgctgatgatcaataccataaacatctgcattggtattaaagtattgaagtggtcgagccgaggcggcaccgtccgtctggtagatccccaagagaaacagcttcaagatggtctgaagtacgtggaacaacttcgtgcggatgctaccaaccacgaagggaattgggggaagattgagacatcccagccctcttctttgcaatctacactaaaagtgcatggctcgttgttgaggtatgacttaactctttaccaatagcactcatttattgacatggcttgatagtgtgtgccggagaacttggaccttaagcgaaaagttatcactcaacttgatgagcttgcacctgaagatacaatcattgcttcgaactcgagtagctacggaatctttgagattatcgatggcatgagcttgaagaacaacaagagaattatgagcgcgcactgctgtaggtgactatatgctaaatggaatatttcgctaacacctagtgtcagattggccgccagagacatccggtaatgcctattccaaattatagccttttcttcaaattgctaacttgggagtcagcaattgaaatcatgggccacaaggatagcgatcctaagctgattgagctcgtcctggagcaatgtaaagaacatgggttctcgcctttctacgtcaaaaaagactctgtcggctacatatacaacaggtgagttattcttctccctctctattactacccgatcaggtttctaacaatcttccagaatctgggctgctatcaagcgagagactctgctcacattgtctgaaggtgttgccacacccaaagaaatcgatgccattttcaaagacgtcttgaagacgcccaagggcccatgtgaacagatggatgttgtcggcttggatgtggtgttggacatcgagaatcactacgccgagtctcggagcggaattcctacagagccgcgagactaccttcgggagatgattcaaggtggaagtctgggtgtcaaaaatggccggggattttacgactatgaagaacaaaagaagtgaatgtttctatagactaacattgatctattctgtcgtttgacatgaaatgccctcttataacttaatagtgaagtcccactataaccaacgaatcagctctcagatccgcctggtacctcagcatcattggtctagtggtagaattcgtcgttgccatcgacgaggcccgtgttcgattcacggatgatgcacatctttttttgctttttcttcgttatagagcaaaaagagaaaaatgtactccgtagattgctcccatttggaaaggtcgctagaaaaatatgcaatctaaatcgttgattgaatatgtagcggatctatcatgaacaaaacgcctaatgcccgaactccatgttaccctaaccccgggaaaccaatcccattccatcataacataacaaggcaaatccatgcccatgcagaaagaaagacatcaaattcatcatccactcagtcccattggcccttatccaacgcacccaaaccaccaccagtatgcttacccagcaacttggcaatgttggaccccccgctgcgctgcttgatacggagctccttttcacgctcacgctcacgggcagctgtgtacgagttgacggcaccgcccttcttaggacccgaagctgcaggtttggtgacacggttggaggtggtcgaactactagaagatgaagagcctgatgtaacacgacgtagaagttgaggagggcggaatccaatgggaccctctccgccgctgccgctgtggaatgcaagcttggagtttgtaggaccagagttggtggatgtggcggagttggacgatgcttgtcggaggagtgcaaggcggtcgaccacgactccgcgcgtgcggcgtgggtggctaggtttgatgaaggtattgtccgattgcggttgatcgtgatcaccttgggcttcttccgcgccgggagtttcatcatctccttgctcgtgttctgcctcatcaagtgaagcatcgtcctggaaggagtcgtattcgaaggtttcagtgaggaaggacaacgtttcgcggatctctgctattgtggctggtttctttgacattgcgctagcaggggtgcgacggaggcgaggcggcagacggttggttgcatcttcagcggatggctcgagagggcgcttgcgactctgaccatcgctcgtcgcatcattcgactgctctcctgaaacggggacctgcggagtttctgtttgggagccgttctcttcttcctcaaggaagtcgatattgaagtcatcatcaatttcgcgatcctcaacggccttgaagaatgcggccttcttggggttgtcggcaatctcgccgattttctcgtctgcaaggagagcgcggcgcatcttagcgaactcgcgctgcttctcacgacgacgtgctaggagctcatcatccgagtcatcaaggtcaaagtcgtcatccacatttttgcgacgacggagggctccagtggtgatgtctctcatcaatttggcgacatctttctcgtcgcggttgcggtcgtgaatcctgtaagaatgttagcatcttctcattgaaaatatatcaagtttgaacatacgcgttgagtgcggccagttgcttctcatcgaccacctcgccactgttgtcattgatcatttggcgatcaacggcattttcttcgccatcgctttcgtcactgtgacctccaaggcctgcatattcatcttcggattcttcggctgcctcatcgataatgtctttcgccttgctggttttcttgtcgtattgcataacatgattcttctttgcagccttatctttcttcatgacattgaaagcgttggcatcgatttcaaagtcaccttcgttattattctcgtcgacttgaacaagttcacttgcacgtcctcgccgcaacattttgcgcttgcgttcagcaatgggcgactgagtttggcccacaaggaccgtgtcgatggtagacatgggtggggtagccttgaatctctttgcaggatcgaatggtgagaatacaaagccctcgtcctgggttgggtcgggcagctgggattgagaatactctgagaaggcatatggtgcaggcgactccgatactcgggtcacactctgcgtgtagctctctataaagttattatcctgggtctgcggctggctgtctggaacaagaacttctgaatcctcctttcgaagttgaggaacaggctgaccagggtctgggagagagaaggggatggtggcagattcttcttgggtaccaacgccattaccatccaacgtggaggcaaatgcctgggtaagacctagggacatatcgcctagtgtgcccatgccaaggaagttgggtcgttcgacggattgcgggacaaaactcggggctctcacaggcgttgagggtgcttgtggttgatcatcatcttcgtcatcgctaactactagagttcgtcgcttccgtctcagggcaggcatctcgttctctgcatctgaaggagcgacctcactctcgtcgtcagccgaatcgtcgtcttcgtcggcctcctcttcgacgagatccccgccaccattgacgcgctcgttttcttcctcttggtcatcttcatcgtccgcttcaacatcaccctcctgatcagagccggaaagcacgtagtcatcatcctcttcttcatcgtcgtcaccattagccttcttcatggcagctttctccagtcggcgaatttcatctccctccttgcgcgctttctcaacaaggttttccatgtcatcctccatcgctgcacgctcctcggctgtttcaatgacaactcccttggccctgagctcatccagccgctcctggcgctccttggccgcttgctgtcgggcccgccataatagatttgcggaaagctctgcggagttcatggaagccatttttcgggtaggagatgccaggtgtgccaatgccttgagcttggtcatagaggggtcttcctgtgcctgtctagtaggcaggttttcgaacgctgcaatgccacggcacttgccaggggatgttatcacctcaagatcgctatcggaatcgtctacatcgttctggtgcgcagcaacctctttcctagaaagcaggacgcggataggtcgttgtgtcagtggtcggaaaactctcttcgattctgcaccatcggatttagattcgggtacagaggccgatacatcttgaactgaagggccctcgaacaattcaggatactgatttggcgccataaggacattcggatcaggcaaaccttcattgtccgtatccatatccatatccacatcttttgcttgagtttgggcatgcccagaattagcggtcgacttagtggaatccaaatgaccgagaactggagaagtatgcggagtgtctttcgttttgttgtgtagttctccgtcagaggaattttgtgatccgaccgctgacgatgaatttgccgcgagctgctcgaccgggggatcgggttgcatgaagttgaatttcgcgaagaggctctccttggtgatcttcttttttgtcttggcctggtgagctaattgcatgttacggctcattcgctgagtctcctgcttcatctcatccagtgccttcttgctggctttccgcggctgacgagccttctgggagagcttgctggcagaacgaggatcgtcagcaccgctctcctcgcctgacactatctgcgaactgaattgttccagctgaacttttcggatggccttcttagtttcggcatcggccttctcgcgctcctcacgttccttgcgcttttgggcaacaagagacaggaaacgggcgtttcctctaggcttcttctcttctgcattttctgtgtcttcgttttcggtgtgtaggtcgtcatgcggttcgcctggagaggatacaaagagaggagagtcggctcttgaacgagaaggggtttggctcgttctgttgtcgggcctgggggagttggttgtggatttgtgctttctcctcggaccggccgtaggtagatcatcatcactggattcgtcgatgggtgtaggttgtggttctgtctgctgtggcttctcgccctgttctttttctgatcgaaaggcctttgacacacgggcaaatgcagaatttccgtcctcggtttcagctgacctggaattaccctgtaaacgagcagccatacggccttttggtcgaaaaacctcatctgcgctagctgattcgtctgagtcgtgcaataggtcattctcgcgtgtattggcgtcccggactaaaccacgccctagatcaagcttcgagacagcatctgttgacttggcaatttgagtatcatcctccgaatcgctatcgaatgctgccatcatggccttgatcttctggccaggagtgataatggtcggcgaatcgcccgcgggcgacacggaacgcgtcgaccgtggtgtggatggcgaggacatggcgcgaatattatggtgaattacggtgtgttttaggaaataattcccatactgatatcaattgtacttggaggcaatctttaagacgtccaagattcagaatgaggtagagtggacgctaggttcaagggcgcatagtctgaacgcgaggcgcgttcctcgcgttgctaggtcatacacgtgaccttatcttacttatcgcctcatttctctcaagcggacgttaattgattattgttacaggcacgaagaggagtagtagatgatattttctcttttaatctatttttgtgagtttttattattttcgaattatctcttcctgtagataaatgctgcgctgctaacatcgaccggagtattgctcatgctgcaagcttgatgccattttctgaatagacgccgagaccacccacagactcctcaaaaatcgcgcaaggaaaaaataacaagcaaaagatacaatacaattcgggcaaggctttatgccagtcaccagaaagaaatgtacacttgttcggggaatcatggaatctcagaaccagagaatctttctcacacgtagtaaatcggttcaccaaacaacagtctgaaccgaagagcaggaaaagtcggcatttccgaatcagactagatctcgatgtcgatgtccatatccagcgctgcaatgttctcgtcgtcggtgttgcggtaagtaatcatgaagccattctttggcttctttgtagtgatgcgaggggcggaagctcccttttgcacggcttttgcgggggtatctttttggttttccacaggagcggcgtcggcagcagcgggtttgggtgttccgttgacatcgtggtgagttttcgccacggttcgcacgcgcatgaagggattcggggcagcctctccacgtgcaacagcctcggctgcctttctagcggcctttctttcctccagctgagcacggcgaacgttctcaatgttaagcttctggttgcgaaggttcatcaagtggactcgttcggcttccgatagaccactatcgacctctttcttgacaaggcttgttccccaggatagggtcggattgaccattttctgtagttctgcctcgattttctcggcctcctccatgtctccgttgaccttggcgaattccaggtttctttcgagttcaagccggttgagcacgttcttcttgtggtcgaaagcaccctggcgacggagtttctcgttcaactcctcccgagtgaaggtgtggttcaggaggcggttgatatcagcgaccttagactcaaccttaccctttgtagccagcttgcaatcctcaacagcgagagtctgaacgtaacggcggtactcggcctaattgactgttagttggcttccaagcttcgaggggaaggaacaaacctcagtaagtggagagttggaaaaagtgacaaatgggaagtctctgacagactttccatgtgccagcttgacatactgatccgtgacaaatgagcggccgttttcgccctccaaggcgtacggcttgccctgagagattcctagggaaatgtcagcgcgcacaaacgagcgaggcagcataagttcttaccagtaatcaggcccaggcgatactcattctggccggtctccgggtgcgggccaatgctcaaccgagcgtagcaaccaatcatagcagtctcaaatccagggtagaagcaaactttggcaaagttattacgtccaatttgagcgcgtcgaatttcgcgaagctcggcgggcgggtcatccttgggaatcgcagcagactggccaacgcggtcatccaattcaagatcactctcggcatcagcatcttcatccgaaatatcagaccccatggagcgcgaacggcggcgcgactttgtagggtctcggcgacgaagttcatcccgcttgcccttttgctcacgctggcgcttgtaggcctcgatggctccggacgtttctcctactttgcgaccaccaagagtggtcttctggcgcgagctcttgcgctggttgtcgtccaagccagcggaccctgcctttcgcttggctttcttggccgctcgtgcttcctcgcgcgagcgagatgctagaaggcgacgtagagccagatcttggttgtggcgatcgacttgctgggcacgttcggacagggtttcctcgcgctggatctcaggcatggccatgatgtccttcttatcctgggccgagtagtacaacttttcatatgggaaaatggggcgatccgcatcgttgtcatccgaattgtcggcctctgactcggactcggacatgggggcggactgaagcgagtgacgagatccatcgtcagacctaaatatatggtcaggttaatgagactcttggctatcaatatggaggggcactgctcacacttcaccctcggattcatccttgggcttgcgcgatcggcggcccactgatttagcagttcctttgcgacccatggctgcaggtgaggtacggtcttgggtgtgtgaagaagcagagtgcgctggtgatttggggggtggtgaagtttcctcctcagagtcacccgccaacgcgagcagctcggcatccaaatcgtctgccattgtgaatatcgaacgcagttataccctctcaacagaaatcaatcaatatgagacctataacaacaggcattcaacagcactatgacaataggagtattcgtactcctatagacttcttccctcctttccaggagtcgttccaaaattggagaagtaggcaagaggggcgaacggtggcccaaaatgcctgttctgaatgaaggaatgtcccaaatttgacagactctctgtataaggcacaaagggagtacagagtggaggatatcgtaaaaaagcacgcatcaacttcatgacgttcaatgccaagcccgataataggcgcgcggtagcgagaaggcggtctaagcgacgaacgcgcgacctccgagcttcgtccctcgaatcggcttcattagtagcctaatttaattcctcgatgttgtctttaccgattctgcgcaggagcgccttgtcgcattgccgatattctgcaccggcagccactccaatctttctcgatttcctcgtgccgtcaacacttaagcatggccaatgtcggcaggcgtcaactaccgccggcacccccggcggctccaaacctctatatgttcttagcaaagagcaacgggaattcatggacggcgctctgcgagtgaatcaagccggtgaactcgccgcgacgctgatctacaaggcgcaaacgcctcagatcgtccgctcatacccgcacctccgacccttgatgaaacacatgtacgaccaggaagcagggcacctgaagaccttcaaccacctcattgccaagcaccagatccgtccgaccgccatgtatcccgcatgggaggtagctgccacatttttgggttggtcaactgcggcattgggtcgcgaagctgcgatggcgtgcaccgaggccgtggagactgaaattggatcacactacaacgaccaagtaagagagattctatcttgggaggctgatgccgagaagcgaggggaggagctggatgaggaactcaaggaaatgctggccacattccggagaattcgcgacgaggaactagaacatctcgaccatgcggtggccaacgattcgaaggaagcgaagccctacgatccgctcgtcgatgtcattcggtttggatgcagggccgctatcaagatcagcgagaagatctgatctggtaattcggaacgcatgtgccggggttgccctgccatatatattttgccgtctaggaccatgtactataccgactacttctctcagtattgctagctatacttaacattgtacattctaattgccggttatgtccgatctaatctaatctatcactcgccgcagggtatcaataaataaccgccttcactaggctcatggtctctgacttttatccccagtgtgtgaccagcgccgctcactcagagtcaatgagctcttgccccaagtaatccatgaagttttgggtgaatctcacaacctgctggtagacctcctcgaatccattagcacccccatagtaaggatcattcaccacctcaccaccgccaatgcgctcgtgcagttttccacccttgccgaaatcgccaaacaatcgcacctcagcaaccttcgcatccgccccatatgtaccgatggcagcatccacgtgcgaccgcgtgctccttgaacttggcttgttgtctgtcttcctctgcagagtcgcaatgacggattcgcgcacatcctgcagctcgcggagattggacttgtccatagcgaggaggtagtcaaaggtgagaaagtcttcccttgtcacttttcgggcggcatgctcgtaatcgtgtattttatggcggcgcagcgtagacatggtgcgggagtcgggcggctcgaggctgtgataggcggctgtaccagcggagtcaatctcaccgatggaggggtgggcgccggccaggttacggaacactccttcggccatgggagaacgacctagacaggattagcatgtcgtaatagcggagaagaaccgagttgatgacgaacagatgtttcccaggcagacaaataacactttggcgggacgcgcattcgagtcggaagccatggtggggtagcagggatcacgaaggaatcttgattttaagattttcaagatatgcggagcaaggaaatatatgcagaagtaagaatcaaagcaggcgatagtatacaattttcatgagggtcgaatttgggtgcaaggcgggggacattgatagaccctggttggggtctccacccctgggagagccatggatatacaaccgttgtcttcattcgacgttgacttgcattgctacacatatgttgtacatcataaagcaggaacaagcaagaaatgagttgtagattggcagctgtctattttatttttattttttcttccaattaaaaaaagaaaagaagagtacatagcccactatgtcacctccaatgacctcagatctaaaaaaagaaatcgatggctgaggggggatgagccacaggtgacaagcccgtgtggctgagttccagtcagttggcccagtaacaccgtccaagtggagttcgtggagtttctcctcttcaacaacccgtggctcactggtttcagcacatccagggttcctgaattgcaatatcattagggcttttatttctgaatcggaagaatctgttcccccctcttgccccccgacatctctacggtgtatgcaggcctaatcagtgtacggtatctccacaaggcacaaggcagtgcggagccgcacagacacatctgattcgccccagatccaccatcgttgccggaatcaaaggcgtcgtaaacaacagtgcggccaagccggagttattccacattttttttcaaagctgttcttcttcaccctccgcgctgtcttgtgacaacccaaaatacatatacggagtaccatctccttatatcaattttcgcttgcgatctcccttctgaaacaacgccgagaacttgcatacgtcaattggactagtgattcctcccgctgacgcttaaatcccactcagcgctcctagcgcaatctccaacaaccctgttacgcacttggggcgggataatttcgctgaactcgattctaaggccccagcattatggcctacaatcgtgtggacgccggtcagtgcttctctagttttattggacctttcctcctccctctctcttttcagcttccccgcgcattctccatctttctgaactgccgactcagtgctggtcattgattcaatggtcccagtacgatttgcgcgatcaaatcattgctactcaagctcttattgagcaatcttctacgtcgcaaaactaacaatgccgccaacagacccgttcggagacgagcatacctcgcccatcttgcatccctcccatctcaccggatacagccatcgccctccttccccagggcaaccattggaacctggctaccagctctcggacaacccatatacatatgcgccccagtcgcatcttgtgatgccatccagtgatcgcttggccgaacaacctactgtgagtattatgagataagagcgaagattgctacgatgagtactgattatctatctaaaaagtactcggtcgaacatgttgatagctcttatggccatcatcccgcatacgacgcacaacgtccctaccctggtcacgagtattcgcttgaccctgaagcccatcacgacgcctactatacccaaccctacgagccgacacaaaccccacatgatgattatgatctaggccagtacccagagggaggacaaactccctttgaagctgaccagcccatcctgcaaacgggcgaaaacccctttgggccggacccatacaccgagttccacgatgaaccgcgcccgacgcccagcccagcgcctcttcgccgctggaagacggtgaaagaagtccaacttttcaacggcaacctcgtccttgattgccccattgcgccgcgactgctcagccagataccccacgcagaggccccaggtcgcgatgaatttacgcacatgcgatattcggcagcgacatgcgatcctgctgatttcttcgaagagcggtttaccctccgtcagaagcttttcgcaaagcctcgcaacaccgaactgttcattgccgtgaccatgtacaacgaagatgacttcctcttcgcgcgcacaatgtctggtgtgtttaagaatattgatcacatgtgttcgcgcacaagcagcaaaacgtggggcaaggattcgtggaagaagattgtagtctgtatcattagcgacggtcgtgccaagatcaacccccggacgcgcgctgtgctggcagctctgggtgtgtaccaggatggaattgcgaagcaacaagtcaacggaaaggacgtgactgcgcatatttacgagtacaccactcaagttgggttggaggtaaagggcactcaagtgcatctcaagcctcgatccggcccgcctgtgcagctgattttttgcttgaaggaaaaaaatcagaagaaaatcaattctcatagatggttcttccaagctttcggccgtgtcttggatcccaacatctgtgtccttttggatgcaggtaccaagcctggcaaagactcgatctatcacctctggaaggctttcgatgtcgagcccatgtgcggtggtgcatgtggtgagatcaaggttatgctgtcccacggcaagaaattgctgaacccgctggtggctggccagaacttcgagtacaagcttagcaacattctcgataaaccgcttgagtcttcattcggtttcattactgtgctacctggtgcgttctccgcctaccggtttgtcgcactccaaaacgacaagaacgggcaaggtccactagagcgatacttcctaggcgaaaagatgcacggtgccaatgccggtatcttcacagccaacatgtacttggctgaggatcgaatcctgtgcttcgagattgtctccaagcggaagtgccgatggcttcttcagtacgtcaagtcgtcgactggtgaaaccgacgtgcctgatcagatggccgagttcattcttcagcgtcgtcgttggctgaatggcagtttcttcgctgcagtttacgccattacccacttctaccagatcttccgtagtgatcacagcttcattcgcaagtttatgctgatgattgaattcgtctatcagacgattgcgatgattttcgcgtggttcggaattgtacgaatctctcccatcatttttttgatatatgctaacgccttgcgcagggtaacttcttcttggtcttccacatcttgaccacatatttgggctcagatgatctactgggtactgctggtaaagttctcggcattatctttgagtggctatacctggcaactctcgttacgtgcttcgttctagctctcggtaatcgacccggcggatcaaacaagttctacatgaccatggtatacttctggattgtgatcatgatataccttgcattcgctgcggtattcgtcacggtcaaatcaatccaaacagaggtcgaatcgaacacctttacagtcagccaactgttcaccaataagacgttcttttccatcatcgtctcccttggatcgacctatgtcatgtggttcctcgcctcgttcatcttcctggacccatggcacatgttcactagtgtaagtgactatatgaatttaatcttgtacaatcttctaacatcctccagttcattcaatacatcttgctcacgccaacctacatcaatgtcctcaacatctacgccttctgcaacacccacgatatcacatggggtactaagggagatgacaaggccgagaaactgccctccgcgcacctcaagcccggcggtaaggtcgacgtcaacattccacaggacgacggcgatctgaacgaccagtatgatgcggagcttgccaagttctccatgaagccccccaaggagatcacagttatttccgaggaagaaaagcaagccgactactacaagggattccgcagtgccgtcgtgctcgcctgggtattctgcaactttgctcttggtgccgttgttctgagcgctgccggtttggaaaccttcgacgacacatccactaccagttccgatgatgcgcagaccgaacgctccatgatttacatggaagttgttctctggagtgttgctggtctttcgatgttcaagtttatgggtgcaatgtggtatctggttgttcgtatggtgagttgtcttcctcgcaaggtttttttttttttcattacgtactaacattatattctagttccgtggcgtttgattcagcgagctcttaaacatgatgattgtgttcctttgcgccaatgctatgttttcatatatcccctgattttatccggatttggtcttggttacaataccacggcgggcccggtctggtacgcaaatgaaaatggaaatggaaatctaatatgtttgatgacttcccagcgatgtgtttttcgtcctttgtgacacgcggaatggctgttttggttttttctttacatctcgacttggtgcatcttttgcatgtgcttgcccttgcatatgtatccttgggctcatgcttttgcttttattttatggagtggaatttgtgtactctatctgtcgatatggaggagaatattatttccgccaattctgtgttcattgcaaagaaactgtatttttgtaggtcaacccgaagcatcacatgaactacgcaataaaagtcagggtttagttttgcgaggtttcaattattgaatatagtgatatccttccattaactatgaacttcactatgaggtactaaaaaagcatcgtccaacaagtgtctagtgcaccaagtaaattagcaccaactccgtaacccgaatcgaacatgatttcaagaagcctgattcttagaatgcacacataatgcaatccctccaagtaccagccccatccccaaccaagtctccttcgcaatcaccttgcggtcaacataccactccccaagaaccgtaaacaagaacgcactcgagtttgccagcggcacagtcaaagaaagttctacacagcaatacattagcaattccgcaccccaaacggcaacactagaacctgagagcaaagaaagccaatagcactcaccatgtttcccaacaagcaaaaaaaaccaaatactgcccgtgaggttgataaccaagggaatcgcatatgcaggtgtacggagcagattaacaaccgtccagaaaacagaaacaatcttcgcccgcagccacgactgcttcaccggacctccatgtctccacgccggcatgggcacatcgtcctcgtcctcgtctgcgccgccttccctgtcttccctatcacggctcccgctctgttcagcaagtccagtatcctgacccgcggtcttcggtttccggttcacgtcactgctcgtactccgtcttggcacatcggcaccggagtcgctgtcttcttcttcccgagagagcaattcctgtgcctcgcccgcgtctgtgaacccggctcgtgccgagtcttgtgagcgtcttcttctgcgcgctgaggtgtttgggtcatttgcttgcttcgcttgccgggcgttgaagtctgctgctgcgcgccggataaagggggttgtgaagccccatgcgacgccgacgaggaggaaggagagcacgtagttgaagacagagggggcgggttcgatggggattccgggatctggatccatgttggtgttttgggacctcgaagggtgtgtaacgattggttggtttgttgcgcggtgttactgcggccttgacgttgatgcagacgtggaccgttggtctgtgcgttactgataagacggataaggtttctagtgacgatccttggatctataaaatggatccaacggttggaatgctttattttaaccacagtagattgatatagtattgaagagactgagtaaaatgataagatattagactggttcgcctgttagggtttcacaccgtggaggcttcaatcacgtctgaacgaatcgacgaattgaccagtcaattgccaacaacccacaacccacagccaacagccaacagtcaacggacaacggacaacggacaatatataacaaccaacagccagcaaccagcaaccagcaaccagcaattagcagccagcggccagcggccaacagccaacagccaacagacaacggccaacagccaacagacaacagacaacagacaacagccaacagccaataaataacccacagcccacacccacaagctcacaaggatactgcacaagataagcatcaagtgcagaatttgctctcagtaggtcaattgcgagcctccgatcaagcttgcccggccgtcacagagggtgtcgccacgtccgatggatgtgcatcatcaagaccgattcatcacagagcaaagtgcccaccaccctccttctcccccgaacccacttccaccagagtccacagcaccagaagagcagatctcctatgtccgttgcttaggcgaacgccgaggcttgagaagacgaacgccccactgtgtccgagaaacgagtcctggtgtgcttcatatctctgacgcgctcaaacggtcgcccgtgcagcgtccccctatctctcaccagcagctcatcctcctctttatgtgtcctcactggcatcttgaaccgtggcagtccctgccaaaccccaccgttctctcaccagcagcccatcctcctctttatgtgtcctcactggcatcttgaaccgtggcagcccctgccaaaccccatgtgtcctcactggcatcttgaaccgtggcagtccctgccaaaccccaccgttctctcaccagcagcccatcctcctctttatgtgtcctcactggcatcttgaaccgtggcagtccctgccaaaccccaccgttctctcaccagcagcccatcctcctctttatgtgtcctcactggcatcttgaaccgtggcagcccgctgcccatcccccttcagtgccgctcgtcacaggtgagtctgctgtcgaatgcccccgccagttgtcctccaccgtcgtcccccactgtcgtccccgtcgtgtccccatcgttccaggtgagtctggtgttgaagtgttagtgtcctagtgttagtgttgttagtgtgaagtaccattgtcattgtcaagtgttagtgtggaagggttagtgtagacgggtaagtgtaggagggtaagggaggaagtgttagtagggtgttagtatggaagtcctaatatggaagtgtcagtatcaaagtcaagtgccaagtgtcaagtgtcctacctggtgtcgaagtgtcgtggtgtggcggtgtgcggtgtcgcaagcaaagaaaggtgaagtggaagagaaagaaagagagaagaaggaaattggggggtagggggtatttatagcttgtgggaaacagcacaacctctgaaatgggaaggcacgtaaagacctactggcacgtgaaataggcaggtgcatgtcaataccctgtcattgttacctcaatcctattcaagaacaatggatatcatggtttttatatgtcctacttgcttgcccgggactctagatattcacgagatagtcaatgtattgtcttagctacagtctatagaccttgaggatgtcccgatctgaagggcccatccttcctgctgggtcgttccttccctttctgccgaagagctaagcgagttgatcaagagtttgcatgatttgcagggaggcacaccgtaaagcccttcaccctacaccctacaccctatacgcacagatcctcgtccatatttctttttgctctcttgtacttaattttttgattgaaatgactgcactctttggttttaataagtggctcgtcgtaggagacatcgaatatcaaggcacggtctgtggtagattgcacatgtcacgctattcatatctaggaattatacgctacgggagtcacccaagtaaccagtaagatgtgtagtatctattagcacgtcctgtgtgagctttcgtctttaattctctcagagatatatccagttgcaccatatagtccgcgatgaagaaccaatgctaatgagaagctcattatccacttgacagattgggaggtcggcctactgtggagatgtgagcatggctcctgagaatggcttatggtactttgcagtatgaagaagcttaattttacggttgcaattggtacttgagtagaattaatttgacacgaacgggtatcatgaagtgatatatatgccaagacatatatatgtagtgtattaggacaatgtctctatgcaacgcagtgtaaaagactcgatataaccaaatgtaacatagatatacagcaacatcagtagctggcccaaaaaaaaaaacattagaaggaaagacaaaaacaccgaaaaatgggaaatattagcatggaggcagtgacacaattacttggcactcttcgatttcttcccaggaatgaatttcatcatcgaggccttcagatccgcactgttccaccgcttcacgcggacaagatagtacatgagggtagccacgaaggtgttgaaaagaatgaaagcccacataataccgaagttgcgccaccgatcaccgtagtagataccggccgtttccatgaactgatccgcaactttgagagagcagtagccgcactcactcgtggcgtcgggattagttatctgtccaccagcggcggcggcatacttcatgaggtactgcccgcaagtatagccagagggaggattgaagatggctagttcggcggtcgagcacaccacctgacgattgtgaagctgtgtgcttgccatgccgccgatccaatatgtgaatggcgagacacggtacatgaagatccagaacccgggaagagcatcggggggctgcatcacaccacagaaggtgagagacatcgcgaagagaagaacgactactgcactggcggtggtttcatctgggagaccagcaatgaccatgtgggtgaaggtgctggcgtagatgaagaaaataatgcagaacaggaggacggttccctgggtcagcgaatcggggattccaacgacggcatagaagtaggagccataggtcaatatacccatgatgaccatgtagggcagctccacaaccatgttggcaatgaggaaagctttccaggagtaggatttgctgggacgttcacgtccctcgtagagcgatcgctggctgacgaagacgggcatgatctggtgagattagtgcatgttcactcgcttgattctagatttggcttacctgttgcgccaatgacgagaagattgtacaaatcatgaacagggagtagacgacagtctgcatgccttgcagcgatgttttggcaccatagaaagagaaaccaatgaatagaccagagacaattccaagcccccatttcgccagaatgtaggctggcatgcgccagtattgttggaacacgcggtatgtgacttcgttaatctggaaccagaacggcatggcgaattcagagtgattttgtgctgaatcatcagtggcggggggttcattttccttttctttgtgaattcgattgatctcattctggacctccgtgctttcgttgctctgcttccacacgtcgaaccagtccatgcccttgtcattctgaccagcgttgacaatgcccagcatatattcagctgggttctcgttatccgcacacttccgcgcaccgttggattcgaagtactcgagcattgtgctagagttatctccaaccggaccgaagtacacggtcttaccgcctcgggcgaggaacagtagctgatcgaattgttggaagagcatggcgctgggttgatggattgtgcaaagaactgcttggccgtgcgaagcaaggtcacgaaggaatgaacaaatagcccaagaactctgagagtcgagaccactgagcaatagttagcatcggtaaggaatgaatttgttgtatagggtacttgcctagtaggctcatccaaaaagagtagtagcttgggtttggcggccaattcaacaccgatagtcaacagcttgcgctgctcgacgtttagaccctcaccaggaacaccgacaatggcttcagcaaactcctccatcttcaacatgctgatcacatcttcgacataggcatacttctctttaaccgaaacggaggctggctgacgtaacattgcactgaatcgcagagactcacgcacagtagcagtatcgaggtgaagatcctgctgttggacataacctgtctttcgctggaaactctgatccagtggacgaccattgacaaacatatcaccagtaataacacccatcgatgtacggtgtgccaatacatcaagcaaagtcgtcttaccagcgccactgacacccataagtgctgtcagggttccaggtttaacccatccagaaacattgtctaaaagacgacgcggctcgcccttaatctcgatatcatagcacacattgcgccaagtgaaggtatctgtctgagcctggatagcacccattcctttttccccagtacccgcagcagcgtggtctttagttgtctcggtgctttcaacatcagatccagacttatggtcctggcgtaaactggcaggctcgtgaccgcgacggaagacgagagcttcggcggcacttgtagtagcagagttcagctcggtcgcgataaagtagatggccatgaaagcgatcaggaagcctatcaggataccaaagtttcgccagacgtgggcgtagctgtagttgtagttcagtgccatgaaccggtcaccgttgactgttgtggcgcctgccagcgaaccaggtgcagtgcaactgaatgcttctcctgataggtcggcataggagggaacgaagcttgagcaagggaactcgcgagcatggaactcgttggcaaccagaatctcgaaggcgtagaagatcggattgagataatgaatccaattgaaccatggatgcatagacggaatagggaggacaaaaccggtgtaaaccacgagaatcaaaatcatgacacctgcaagacccattgcctgtgaaatagtcttggtgacagcggccagtgtgcggaagattgcactcatgacgaacgtgatgatgaaagtgatgaggaaatagaggaagaagttggaaggttctcgttgcagaccagctagaaagtataggatgatgttgaacacgacagataagacaaacttgactgggatatcactaatcacaccagcaatagcttctgtgaagggatgataaaaggcaaaggaggcatgtttttcgacgattgggcgttgtgaataaagattgttgatttcggacattgcggtgagggcattgagcaggacggcgaagaatagagttgcacatttcgacgtaaagcccacagttgcattcggggtatcgtagaagacagatccaatgatcaaagccatgataatattagtgaccaccacagatatggtggaggcagcatcgttccagagtcgttggtaggcgcgaacggtgttgagtctgatttgcatataaacgctgatgatgtatggagacttgggtcgagtatgtttggcctggacgccacgcttccaattctgtaaatcagctagggcttgcacatcatctccaacaggattttgtccttcatattcagcaatttcatttagcaattgcttgtattcaggtgacttcagccatgcagcctcaaagtccgcaggagtacggggaacacgattttccatgccaggcttggctctccgctcctggggattcgagatcgaagtgaggaaatctccagtggtctgccgcgtcgggcaatcccagccctggttctcaaagtaagacttggctgcggacgcagctccgaagaatacttggtggccttcgtaaagtacaatcaccttgtcaaatacatcgtagatgctttgactggcttggtaagcagcgactgcttgacacgcgccagtgatatcagaggatagtcgcaaagcctcgacaaacttcaacgcggtggcggaatccaatcctcgagtggagttgtcccaggcagcgattggagcatgggctagggccatctctgcaatactgacacgctttcgctcaccaccggaaacaccacggatgaaatcgtctccgacgcgcgtgttgtatgtgtgactcaatccaaagacagccatgatgatctgggccatatatttggcaaattctgcgcgcgacatgccttggaaccgatgggcgggagttcgtgttgcagctgcaaactccaaagtctgaccgacggtcaagtgagggaagtgtctgtcaacctatagaattcaagattagcgatattctcattggcgtggtatgttgcgactgtacctcttggttgtatactagttcgcccttgaactctttcatcatgcgagtttgaggaattcctaatgactgttagctttaactaaaggatgcgggacctcaattcttaccattgtaatgaatgacactctccttgtccatcttcaaaccatgcagctctccagtcatggacttcagtagcgtactacagccggcacctggccgaccaagcacaagcagcatctcgccactttttaaaatgccattgaagtccttgaggattcgcctttgaggagagtgtgattcacgaatgatttggggcaaccgaaagggggcggtcagggtcgatgtaactgtatcttggaactgcagcgcagcgcccgatccgtatatgttgaggtttttgaaaacgacgtctgatgtgtgtcccgctgggccatcccggttgaggtctttgaaagccgcttttagccatttttgcaagtcgaactttccagattgggggtcgagagctggatcttgttcggcgagggcttctaggttatccgaggttccaggggccggttgccggtgtgaatgttcagtggctattctcgtgagggtgtcaacatcgttttggttgatgtatgtcatggactggactctcccgagagtcgatccggtatggggtggttgttcatccttttccctcagctcgaaggagtctttctcggacgtcatcgtgccgagatagaataaggaacgagcacagggaggcttaaagagaaattaattataatgagaaatcacacaaatgcgggcgcgatcagatatttaaagcctaggcactacgtttccgtttttggatgacatcttccattgtaatgagaactgtgggtcggagtcggaggtcggagcaattgaagacaatggaagagatataagtggagttgtgccctgttacgatattacgatcccaggacaatgattcggcacgggatacgaacagatcgacatcgaatcgggctcgccaagttgcgccaagtttgccgtaagggacctagtcgcgataactgcatccttaactgcccgctagaacctaaaggttttctaagcattctgctgagtcagcggcacttttttcgaccccgggacccggaacacggagataggcgatcccgagcctcggctcccgagcttatgcgaagccgtggacggtacgcgctgtacataaatccaattatgatttgccagacgcagtagagcttgcgagtgcatatctaaaatctttgcgccccacatttttttccagtatccctttattgattattattacagaccatacctatctaagactcggaggaaaattcggtcaaattgggcctgcatcggctcgggaacacatcggcacccattgatctttgaaccctgagacccgttaagccgggactaggcaccttacaacatatacactacgtatacgagcacggatgtggtactgtacaaagcacctggatgtggcgactcttgtgcgtttggtggcttcattgttggcttgcaagattgcttgtcgccactttttgatccgtacctggtggagcgcagattaccccagtatgcatatatgtaaggctcctctacggagtaaacaatgtactgttttcgatagactatattgatctcgccgtgacactatctatatgttgtagtgaatagtaccgaattaatgaagaatggcactcgggggacccgtggactaaccatgtctcgcggaatcatgatgcgattatgcatacaacgtacgatcacatgctatcacatgctacaggttgtcttttgctgtttgcgcggtttgacaaagtggggctgggcttgctcgtgcctcccggaggttccagggttaccgttatctccgttatctccccatactattttgaattgaccgcactcttcagtattcaaagaactggcttataacaattaatataaaagtcaagcgatcaattcgaaaagccagctccatagcaagagctaagtgcaggatctaattgcaaggcttacctcgccggaatcaacaacacggctggaaagtcgtggataaaggggttatttacatctacatggttggtaaaccaaaaggagcaaataatggatttaaaatagtgttcattgttcatgcaaaatcattacttccccgtcgcctccgcgggtattgaactcgagtgagaacgcaagctgaaagcagaccacagccagtgagaaaccaattaccgaagatcttgttgggattcgggatcgatgtctccagaaaagatggagttgacagatggcttgtaggcgtggagatagttggagttgcaagccaagacgtcttaacaatatccgaagcaagcgtcgatatcgtgattcgagaggctgtgtatcggggagtaaatgtctgacctggagtctaaactgcttggtgtgactctattggtcgcttgatgccattgaggtcgaccatggtggcaaggcatgtgccagtgatggttctgcaaaaaggcttggctccagtagagcgactgaaagaagacaatatgaggatgaggatggggataaaggatggggatggggatggaggtggaggtgggaatataatgaatttgtccgtgacagctgaagaaagccgttgtcgtccgagtcgctttgcgaagccacgcccggttgttggtttgccccgaggcaacttacggtgagtagcatttaaactaccggccggagtgctttcaccataagcttgtcgactgagtcgctttgcgaggccacgcccagttgctggagacttgcagtgggtagcatttaaactaccggccggagtgcttccactgcaagtctgtcgaccagaacggttcctggctgctgggttgttgtgaggcgacgaggggagggggatagggatgaggtggggtggggcatatggagtggggtttgggggagagggaggagatttgctagaaacgagttagcgagttcaaacatataagaccaaagaatgaatgcatattaccatgaacagttgtagtagaaggttgctggggccaagagggaagatcacgatggaaggttcttaggatgaaaggtcattgtcttgatgaaggttgttgtcttcgaagaaggatgttgtcatgatggaaagttgtcataatggaagtgtccaaggttgacatgttagatggtagtcaaggtcataatgagttgacatggtggatggttgacaaggccgtagtggaagattgtcaccatacagggttgtcaaggccataacatatggttgacatggttgaaggtggtatggcctgaggttgacatggttatagtggatggtatatgaaggccattgaaagtggaggtgccaaacccgagagatgcgaaggaggaaagaaagagaaagagaaattggggggaagagggggtatttatacccttccagtggcttaaggtcatgagaaactggggtgggtgacgatttttgaccagaagggaaggaactagggcaaacctgcaaaccatctggtcgcaccttccaatatttatccgacatgtgacagtcgaagctgcactcgcgctgtctatcagtggacgaatctacaaatcctaggccaattagcaaaaactactagtctatacatcagaggtatcaactttgcctatctatatacactccaagaccggcgtgactgttatggagtgagttattgaggctttgatattttagaccttgccatgaggcagtaaatcaatggagacagtatattatgtactcttcgccatatgtttcatgagcaatttctttttcaattcgcaagttacatatatagtcgaggcttcgaaggctactcggacagtgcttctattgccacatagtatacattattgtaatttgtttgtctgcagtacctaatatgtactatcaagagatatatgtagagaatacagacagattcagcactctaagccgttgctatattcataaaaagcgcgtataattgttttgggatgatttcggacacctggggatgctgagtgtaaataatgcagaatcttagctaagcaatcatatatccatccatggaacctagatcggtacctaaatcaagtgacaggccaaatggaaacaggattctaatcgagaccgatgtcagcggggcagatcggcgggctccgatgggaataaaacaaacttggaagccctcctcccctctttttctcttcatgagcccagaaatatcatctcaccatggcaatccaatcactacgtgaaatcaacgcttacaatctgcgcaccttcaagcaccactatgtctccgagatctcaggctcgctcggcgatctaggcacattcctgcctatcgcgcttgcgctagctgtcaacggcactgtctccctcgccagtacattgatcttctccggaattttcaatattctaactggtctgttctttggtattccactgccagtccagccgatgaaggcaatcgccgcagtggctatcgcgcgcagtttctcaaatggcacgatcgctgcagcggggatcttcgtcggcggctgtatccttgtcttcagcttgacgggtatcttgcactggttcgccagtgtgattcctattccggttatcaaaggtatccaagtcggggcgggattatccttgatcatcgcagcctgcagcagcatgctgcacccattgggctggaccagcccctcctgggccgataaccgtatctgggcaatcgctgcatttgttgcgcttctgctcaccaatgtttatcgccgagtaccctatgcaattgccgtgttggtgctaggtctggtgtttgccattattcggactacagtcgctggacatatgcccgctttcgaagtgtggcatcctttcgctctggttccgaccccacatcaatggcgcgtcggtgctgtggacgctggtattggtcaaattcctcttaccaccctgaattctattgtggcggttgttcacttggcgagtgatctactgccggatgtccgcactccgtccatcaccaacgtcgggttgagcgtagccggcatgaacttgattggctgctggttcggtgctatgcccgtctgtcatggttccggtggtcttgccgcgcagtatcggttcggagctcgctcgggagcaagtgtgattttcctcggcctgttgaaacttatgattggccttcttttcggagagaccttggttgacctcctgaagcgatttcccgctgccttccttggtgtaatggtcattgcagccggtacagagctgcttggcgtcggcgagagcctcaacaccacgggtgctcgggacctcaaccagaccggtggtggccttgtgtcgaacattgaacagcatattggtcccatgcttacagatgaagaacgcagtcgtcgctggactgtcatgatggtcactgtgggattactggtaggattcaaaaatgatgcgattggcttcattgctggtatgctttgccactggtcctacgacatcccgaaatggtgggagcaggcgcgtagccgctggtcggagggacgtctacgtctacgtgactagaaataggtgtggaatttcggggtttgaaatctcatgatattcttcacaatatatacgtaaagaattcacagatatgcattttgatcttttttatatatagcaaaaacaagcgcaattactcaccataagcaaatgcaggtcttcaccaacacactcaccaacacactcaccaatacactcaccaatacactcacctatagtacatccctaacatccacatcacttcctctctgtagcctggtacctgtactaggattctcataagggcggtcctccctcgccgcagacgaaaagccatccgaagcaaaattcacatcccgtccaaaccggcgaccctccctatggcgccgagtaacgccccctatatcatactcggagtcattataattgcccgtcacggggtcataaaccctagaccccaatggcgaagaaaccaaactaaacgaatcgtcctcgccgtccccatccaagagctgagccgccgcacccctaatatcagccatgacattgggcgcggaatctggggtcggggtatctttggaatctgaaacgtcatcctctagttccgtgatgcgccgtattcctcctgcagagctaccgccaggctcgggtaaagctagctgttcctggcctgtattgtcgtatcgtcgttcttcgacgacggccggttggcctagatcttgctgggctgtacgcacgactgttgagccgtcgggttcggtgtatgaagttgtcgaatacctgtgtccggttgtagtcctgccgtcggtgccgttggttgtggaactgtagtagtacgtggagcttatgaaggagtcggacatcgtagcggtgatatgtggaaaagtaaaagattgatctggtccacttgggatgatttgcggtttttgagttttgtttagttgggtaaatggagaatatagaatactaaacctttggggaggttgttttatttctttgcttgtagaagcgtctccgtaagatgtcgatatatgcaatgtacaagttgtactggttgctttcgaagttcaaaatgttgaatatcgatgcgtttatatatttcatcttcccctgtcctgtggcaagctttacttgccgcttgcatcattgcctcgtgcggcaaccaacctctatggaagaggcaaagacccatccgcgtcgccgaggggtctggaggtaccccacgagaatagagccggggaaacaaagcatatattgaacgtctaggcgttgtccatagatgcgcgtgcatggatgaggtcccagataaggtactgggcgtatcaaaacggcttatcatctcccccgcttttcaacatcgaaaccaactcatctccaactctggaacaaaaagcacttcatggctggacttaccgaaactcaggtcgcctccttcaaggagaacgggtacctcgtcctccccaactacctcgccccaaccgaagtcaccgctctcctcgccgagacaaacaaactccttgaggaattcccactagaatcccaccccctcacccagttcacaacgggcgacgaaaccgccgaccatgtcggcgacgactacttcctaaactcgggcgacaaaatccgcttctttttcgagcccgacgcgttcagcaccgagccggatccagtgaccggtcgcgccgcgctcctgaagcccaaaaaccgcgccgtcaacaagatcggtcactcgctgcataccctatcgcctcctttcaaggccatctcgctcaacgagcggaacgctgctgtcgcgcggtccctgggattcgtcgatccacgcgtgctgcagagtatggttatctgcaagcagccctcgattggtggggccgtgccatcccatcgcgattcggagtttttgtatacggatccaccctctgctgtgggttggtggtatgcgctgcaggatgcgggaccggcgaatgggacgttgggtatgtacaaggggtcgcatacgggaaggaagggtggtcatattgctaggaggtttgtgaggagggagaatggggcggggacggagtttattgagaatcgggggcctgcgctccccaaaggcatggaggaggagaagagtgaggaggctacagatgaggatttggagattcttgatattaaggctggatcgcttgtgctcattcatgggaatgttttgcataagagtgagaagaataccagcctcaatagtcggtatgcttataccttccatgttattgagggtgccgatgggtgggagtatgatgtgcgaaattggttgcagccgcctgctggtgggttctcaaagttgaatgcttgatacacagttagaatacgaatgaatgatgttacggtcaataatggtaaatagttcgacttttattctttatgcaaatcctgtacaaaagatggcccgccatatacaccagtgtgcgaatcccagacaccccgaactccaagttgcgattcaaggctgtcagatcaggtcgccttcaacatgtcaagcattccctttgtttgccacgcttgttgggccatctccacttcgtcacgcacccggcggtgcagacgctccaccatcttgtcgacctgtaccgactggcccaggtttccggagtagatatcgagaaggttcatggcgacctcgacgctaagatcgaccaggcggggttcacggatgttcttgtaaacccactgcagcacaggctggagggtgacttcatcgcggtccttcagcgaggcacggagggcggagcggtggcgcagggccgtaagcagtgtgagttgcgaagtcttgtcagccgagctgaggacctggtccaaagcaacagagtagcgtgccttacggagatcgttctcccaaggctgttctctcttacgcttcttgcggtcctggccctcaatgacaatctccacaccttctccgatgaaatcgcgtccacgtagacgcttttcccatccagagccacgggtcttcttcttcttagcgacttcccggtcgtgctcctccaatttgccctccagcagagctgccatttccttccggcgttctcgctccttgatcttctgttggccagatagtcgggtcttgatagacagaagacctgactgcataccaacagcaatgtgcttatcctcgtattctgttccggaagtgatcgcgcggagagagagaatgggtgatgggtatttggatccggagacggggttccacccagtggtctcaaagaccttcatgtgtccatcgagggcaccactgagcaatcgctcaccattagaggccagcgcaagggcagtgacagtcttttgatggctctggatcatgtgcagcggcttaccagccacaatatccagcaccgcaatcttgttatcggccgcagccaaaactgtagttccggcgggcataggcagaatagtctcaatcggcgcacccatcttgaacgtcatagcggcacggtttccaactcgaggatcccacagtcgaacagtccgatcgtaagaacctgaaaccaccagaccagaagaagccatagagccaggcatgaatgcaccgctgcgcacgtaatcggtgtggccgacaaaggtgcgcgcactggtttgcgacggcaagtcccacaaccgcactgtacggtcatcactggctgtgaggaccgctgtagggtcgctaggagagaacttggtcacccacacaggcagcttgtgatccttccacgtcttgaggatggcgcgcgatttgacatcgaaaacttgcacggaaccggtgtcgtcacctgcaaccaagacacgtccatcgggacgaacgtcagtaccgcgcacggtgtcgtcaaaccgtgtaagtgtccgcaggagtttccgtgtgcgaattgaatagatctggactcgtgcgcctgttgtcacagtaaagacatcgggcggttgtgtgagagaggggaatgccgcagcagaggaaggaacggagggctgagtgatgagattgaccggtccattggccggtgacgggatcaggagcgggtttttgaatgttcgccagtattgttgctcgggcgttagctgcgtcgagggtaacgaggcgagcttgacctgctgcagaggcaggacgggcgccgccatggttgcagtggtggatagacagtagttatttggggggtgttaatcaggtgggcaacccgaaataagcaacaggcgataatgttaagccgactagagtgctatcatgaagttcatgaagaccatcttttttctgccgatcaaaaaagttcgtctcgcccaatcgggaatggtggcggtagcattctctgcctgaggcataatgttctgaatttttgcctgaggccacacggcagaacatcaactcttggcattcttggcattggctttgactttacatcaatcaaagaaatggctgacacagccagagcctagactggacccctcgtaagatgagtctgagggaaaataaaaaatgaaatgtaaaaaatacctcggctgatactttttcgcccgagccattggaagttctctgcctctgatttcaatgaggctggctacaagcaccattcctcggctgacctgccaggctacataatatattccattctcgggtaatacatcatgtaccgagtacgaagtattaatgcttttacatatgtatcacattcatcagattgatcagtctaaagagattcccctcagtaagcccaactttttttcatcacttgacctaaagataagctaaaaactagtggatggatacatatgcatacaaagtacattgtacagcataggcttccgcaatttaaccatccgcaatgttaataatagtaaccttggtgggtattgattgcccaacaagcccacttgaggcaccggcacaggcaacatcattaatcataaagcgtctagaacccgtagaggatgagcaagcgaggcaagacagtctcaccaatattgccaatgtatgaaaggcatctcgaatctcactaggactgtgagtggccactagtcaggtcaatctccagtgggggggaaacggagatccatcggggtgcagctgcctaaccctaaaggtggggaggggagccgcgacacttcacagcttattgaagcccaaatgccgctggaaccggcactttttttttccacaggcaagaggaccgagaatactcggtacgaggcactgtagatgaatagcgatagtgtctgggccatccaatgatcggcgatatacaatataaatctctgaacccgcggtggctgggaatccgatgaggccgcgggatcagatcgcgctgagggatccactacatgcgggaatacctgaccggggttggccaactgaagatgagttgaatgacatcatgagatatatcgcagcatacacgaggattaatatacaagataggattgagaatggcacgaggtgcaaatagagagcgacttacctaacccagtggcttcctaactcggtagcggtggtcgtagcttcccagttccattgtttactcgcatgcaaggtttgtgtatccatggtatggatgaatcgccccgtccagacaccgccaggggtagggaccaatcatatctgaggatctgttacaacccccccagccacctccaatccccgtataggacattctaagagtatgttttctctttcctccttccccctctccacactgtagacattgactctatggtcttttctgctcatattcaatacatccagtgattagcaactggtcacgaaatgtcgaagatctccaaggtcaaccatgcagcaggcatcttcgccgacatatccgtcgatggccccattattggcacattggtcgctatcgttgaccgagcgaagaacctacccaaccggaagactatgggcaagcagaatccctatgctgcagcacgactaggcaaggaggcaaagaagacacaaacagacttgcgaggtggacaaactcctcgatggtaagcattgagcctgatagatgtacaaatggaagataagcttacctgcctagggactcggaactccgatttaccgtacacgaatcacccgactacttcaaattgaaggtctccgtgttcaatgacgataagaagaccgacctgatcggtgaaacctgggtggatttacaaagcttgatcattccgggtggaagccaaaatgatcactggcacccacttcaataccgtgggaaatatgccggggatatccggattgaaatgacctactacgacacgagacaacaagatgaggttctcattggacgccgacaagaagccgccgaccgggtccaaggcaaggtccctagtactccaggcagcacgggcttgtctggcccccgccaattgaaagatgtcaaacgacgacccttgcccagtggtccttcaggggcctcggcgagacaacctgtggaacaagctcactctccacttccacttcaacaaccggtcccatcgagacccgccatccctgagcattcaaacattgcatctagtgctccggaaagcacatatgccccgagatattcagagcctgcttacgatgcatcaacatatcacgccccttctcctgtgccgcctccctcccggggtgggtatgagagcgatagccacactcaaggatgggacactgcatctgttgctcctctccgccgaaaaatcacccatgaactgccttacgcttcaaatgaagttatggaaaatacatatgatccgcgtttgctacagcagcagcagcaggaacaggaacagcagcaatttcaactgcatcaacaacagctgcatcaacaacaacaacaacaacaactgcatcaacaacaactgcaacagcagcagcagcagcaacaacaacaacaacaacaacaacagcaacagcaactacggaatcgttccgaatatgatcggccaccttcgagagacaatcgcctcaccaggcaaagccagtacgaggcagatccctatgaggaagtttcatacctctcctctcaagactactctcaaatagagcaaccgcgatacaatccggaccctatgtcatatggcgcaacccatccacacgatgtgtcaggttcagagttcatgtcttcctttttagggtctgtggatgaaccgagataccatccaagatctcgccctctacaaatcacggctcatggtcatgattggcacccagagtatgctggaatgcaaccacgagtagaggatgaagatgataacggaccgccccctcctccaccggcacatcggtcacggaggcactctcaactgcccaccccgcaatcatcgccccactcgtatgcagcctacacaccccagtccacacctcgatcctcggctccccatctaccatcaagcatgcctaccccgtcccaccgcgatcactatcaggagccttctttaatggagaactctcccgcgatgcccgcaagcctcgttgcaggtcatgaagtggaagacccatctgagaaagcagcatttgagcgatcagtccgcagacgcagcacccaatgggacgatgagatgatgatctcccagtcgcctgtactagctcctgtatcagtccccgttcactacgatgctcctgtctacagtctgcgaacatcccccaaccctatcgagcaaaggcccacttctagcagaggtggatctgtcagctctgatatgcgggctgtgactcggaaatccgtcagtccgcggccctctacttcagacgtcggtggtggctcttcagtccctttctctcccgactcctacatctcgctaaacccgaatgcctctcacaatcccaaccgagatccttccccggcgtacaacacacctatgcaggctagagatgctgtgatacgtggaaagactgaaccccgtcgagacggagatcacccaattataggagatgatggtcgggagattgacccatccgaccatcttcccactgatacatgggcacccgaaccagaaaggaagaaccgcaagcctgaggtcatcatccgcttcaaaaactcgccccggccaacttctagaggcaatgacgctcccccaccacgcagcacaggccagccacgcgtagcattcaaaactgagaacaacacctatgcaccagatcgcccagtcaagttcacacccccccaggtgcacccaaatccagggtcaatggttcgagctccacctcggccggactacgcgcgtgaacgctctgacagctacgcgcgaagtcgggcctacagcgcgaccacttcggttggccggccgcgctcttctcgaggctctgtttctccaaacccagggtctcgtaagccactgtatgactacagcccaggtcccccaattccaagcaaagtgccaatcacaggaggagctccaagctatcccgtcatgtctggcaatacaaacggaaacgaccgcatggatgccctcagtctagagctgagtacgattgacattggctctgcagcttgcaaccctggccggggggctgttcgaaaatacgtcccaagacagccagcttcaatcggctacgctaggtaaaacgatttgctttttacatttatgcatgatttatgtactgctatttttctttggggtccttggtgtggttggtgtatctctcgggtccgtttcgattcttgttttcagactgcattgctctggcgttatggatctgatctacggggaaatggggcttgatcatgtacaccataacgggaataaccaagcttggaatgatatcgtaaagtgacatttaattcttactagatgagtgcttccgtagattagagagtatcttcaacaagatcattgatgtaatcagttgctcgatggtctgacagtagacctcagtgtgcctatataggtcttcttgatatcctgggttttccagtgattatattccctgctagctccagctgcctgtggttgtctgtttgcacatgcggtcgtatatggagacatcgtgctcaggtcatgccaacctgattacctttacaaccttctagaacatcatgatcatgtctctctatatataaataccgtcatactcaataaatcatcctagagactaggttgttccaattgctactagctacaaaccagcacacacgatgtaacgacagagctcttactgtagaagttggcagggtaagaacccaataaaggaaaaaaaagccatctgaactcgacccaagtcaaacgcagtaggtaagttcctgcaaagttataaagctcatcttattacagctcccctcttccccctctatcctattctcgcaccctgctttccttttcattttggctcaacaccaggacccttccacattatcagacagctttgctatcaaaaaccatctatcaaaaaccatcaggtagtgcgttcctcatcaagaacgtacttcccatcttccttcgtccttgtcttgtttggcatgtccacagccatgcaaggtcagggctctgacgtccatggccatcaaggccatctccctgaggagaacgtgaaaatgtacgtatagtaacatcccctcaatctactcggtatcatgagttgaaaaccctatccttcttgttgacgtgaacgtcttttgattttgtcttgggatcgttttgctaacctatagagctcagacctagcaacaatgtccacatcaaccaagatgctttgacgtgagtatacgctatatcccctggcgtcgttgtgtgcctagcagccaagcctatactatctggtatcaagcctttagcctcagtcttttgatagttctctgccttgctatcactttttcattatctacgaacagtgctacgtgatacaatcccatcttgggtgttggaagcatcgtgttctatgaagatttcagctaaacaaagtattagtcctgacagtcccaatcaaacaatccaccaggagaaccgagcgctgtcgctacttctctctcctccgcccagttcgcctttgatacctctgggcacaatcgattccgcacccacccaatacagcccagaatatccggctggtccccagttcaccagaatgaatggatcataccgtgtttataatccaattcggggagcggagctcaggactgcggccgatcttgccaacccattcagagacagactggatcaaggtggccagatgcgagaccatggaagggctcgcagtagaagcccttacagctcgattcaatccaacgggcttcttgaatcccaggatctaccagcagggccagcgaggggattcaatcactatcctcgggaggtgtatgttccgcctggcatcaatgacatgatgcatctgaatctgcctagctcttctccgacactgtttccggacaacacccatagtggtggtcgtgatcttgctttgagcctcccaggggactctctgggacagagttaccatctcaatgatggcaattggtatggatacccccaggagcaacagcaacaacaggtgcaagggcccgaaagaccaccagtcgccaagcaagaggaggaggacctcgacgacaactacgaggaccatttgtgcgaattcgctgcaccatgccgaatgcatccctcgcctgatggaatgcactaccgaaaggtagtatcgcatgtgttcggcagaaacaaggccgtcaccaagctgtttccactcggagtttgggtccactactgccggaagcactaccagcgcgcccggtatcgcgcagatcaatggcctttcacacagtgtgacctcctgcttgagtcactgacacgtatggaaagctgggatggagtggagagcttcgagctgatccttcgccggcgagagcaaatgcgtgtcgggcgtgaagctgagggcacaacgaccactgagacctccaagcagaaagaggtcacttcctccggcaaggcccaagatcagggcaccaagtcttcggctattgtcacccgcccgggccgtagacacccaactgccatcatcgcccctgtcccagactggcttcggcaacacgttggtcatggcaagacctttcaggaaatccgccagatcatcgaaatggtgcgcagccacatggtccggctgcgaaaccaagaacgagcgcaacagcagctcaacgacgttcccaagtccccaggcaaaccaggaagccttcgtcgaggtgcatcctcgagcatccgaaagggacgtaccgcgaagggccaaagcccccttcccctgcgtcctagcacggttcgattccccgacgttgaaatcctcccccatttcaagccctgggtgaaggaggctgctttgcggcagcgatctgccacaaacggcccaatgaacatgaacatgaacgagcccgagatcaaggacgagtcggagcagagaattctcggtggtggacgtgtccttggagaaatccaggataaccgggacaccaatggcgctggatccagccaggcatcaaacggcgactttgcagctacagcagcgcagcactgcgagggccgcctcgagtctgttactgctgtttctgctgacgacaccgctggggtcaatctcttgcaggtgcagcctcacatcggtagggctgggaccaaccgtggccagtctgagagccagcgccgccgcagcgagcgggtctatatcaaggccctagatcgtctccctggccagagcttgaacaagaagaccatcaaggaggatgaggaggaggaagcggagaatgaaatgtagtcttccattggaatcggcaatctgggttgtgactcatgcggatcgctcatatctgagctcatgtatccgagttctattgatgtcagataaagaaaaaggatcaggttattggcggatgatgctccgccggaatgttgcagaagtcgagttggttggagtgctgaagggactttaagtatgctgcttgatcgcgcgtttcgcgggaatatcgcgggcgaatttgattctcaaaataatgaagcggcggtgatagaaatttgatgtaagagaagttgaaatctgaaggaaatgtgagagaatatatttccgtgcacagcaaacaatcaaatttgatcccattgcgttgatatccgatcaatgactgcctggtcatgtagttgtcttcattaattctacgatggcaaactccatatacaatatagggctatgcctgacagctgaaggcaatttcaacgacattcggaaattcgagatctcaaatcccatttcagcttcatcagagactaccgatatacatatggatgtacccataaacagtgaaaatctaattgaacgaatatttgaatgcgaggaaaaaaaacgagtaagaagaagatccaggacacatactccgtacaatatagacaaccgcaacaatacgacacgcttgctaaagacaccgaaatgcaaggaacaaaaagtccctatgcaaccacccaagtaatatgaatcaaaaaagagattaatgtaaggtaattatcatggtagtttttgtatggaaaaaaatgccaaattcaggtctctaaacagactggtctagcttgccacagccagctgggcgacgagatcagacgccacatcgaggaaggggtaaggactggtcacctccttctccttgttcttgaggcgtctgctgatgggatgccattcggtttcgccatgagcgcggatcacgttctggtagccatcgcatttgaagtcgaccatgtagttgttctcttcgagttggtagagctgtatgtcgaggaagacccagacaccgtaggtgatcttctggagtccgcttggtacattgactgaggaggccgcactagcgctctcggggacggaggactggggttctctgcttcggtcttccgttggggcagagattcccgagatgttgaaacggcggcgcagttcctcgaggtcactgcggctactgtaagcactggtggtgtctccaggagggttgatgccttctttcagcaggcgtgcacggataaaccatgggtccttgggaatgtagtagtcggatgggaggtcggggtatttgctctgcaagggtttgggcttatcaggggagggggtcgcatcgggaccaatattggtgcctagagaatataagaatcggctcaaaatgagtaatgggtggaaacatacctgattccacgggttgaatatcccacaatccaccctgggcagcaattgcccggtacagatacagcatggcctcatatggctggtttcgggaccgaataccaaactgccatttacggctccgtttgggctgtttttctaggggttgaccggttggcggctcgaatcgcaacttgtccaagtcgacgacactgcgtgagtggggcttcaatgcacgggctgtggcagcctgttcttcgggagacatgtcccgataggcagatccctgtccctctgggtcaagcttgatggcctcttggcgacgctgctcgagcatttggttgcgagctcttttatctcgatcacgttgttccatgagttggtcgtgaacgtacggcaagctagtagggaggattcggacgtggctaacgcggagttcgtcctcgtctgattgctgtggatcttccgaggccctacggcgcgatgcactagcggtcctgtccatggtgggggcggccggggtcccttgatgacgaggcgcaggagtccgatccgcagatgaaggcgcagctcctttctgggcattttgagctaacaaattatcatccgagggtgctatcgtcgttagcagaggtaggttagtttagtagatcaagacttacaattagtttgcatcatctcattctcaacaacgatggagaacgcatccttgatcgcgctgggttcagcttgtctcaatgcctcttcgatatcttctcggccatatcccatgcttcgttcgagcttggaaactgcaattcgatggattttgctttgaaccgatataggctttgctatgtcaagccttgcagaatcaaccttcttcgggtccacccccggggcgatgaattcctctcgtggtggttctaggtacttggggagattcttcttaaaccatgggtcttctctgatctcagggattgtaatgcggtggacggggtgaacttggagcattgcccggatcaaacgagctgccccggatgaaacatatccaggtatgtggaaggtgcccgctgcaatcttcttgaaaagggctggaatatagtcatcatcgaaaggcaagcggcccaccaacaacacatacagaatgacaccacaactccacacatcgacctcaggaccagcatagagctttccggagatgacctctggcgcagcgtagttcgggctaccgcagctggtcttcaggaagttgccatccgtcataatattactcaaaccgaaatccgcaatcttaacgttcttctggttgtcgatgagcaggttctcaggcttcaagtcacggtgtacaatcttgtgtcggtggcagtattccacagcacagatgatttgctggaagaatttccgggcttcatcgtcgccgcatcttcccttcctcacgagataatcgaacaactctcgctctgcgtactccagcaccatcacaatatcggtcttggtcgcaatcaccgtatacctaaatcattggtcagccaactgaaatcccaatttcagtgtggattgaaattgtacaatttgatgatgtgtggatgtcgtagcaattgcaagtactggatttctcgctccacgcgcccaaccatatctctggagagtagtttgcgtcgggagatgatcttcagagcaacttgacgtccagttggctggtggatagcaagcttcaccttgccaaaggaaccctcgcccaagacccgtatagtctggtactggtcgaggcgttgcatatctcgggtagtcgacggtgactgcaatgggtcctcgatcttgctggtcggcctcgagggcgcgggcattgccatggcggaggggttggaggcgggaggtctcgcacgttcacgcggacgatcacggtcggaggggaggggaatagcgaggtcttcctcgtcgaatgcagcggccatggtcgggaataatgccaacgtgacgtgattgattttccagacggttcagcggtcgggactgctgactgtgcagaccgttcagtgcccgggagggttttctctctattttttctctccaaacatttgccaggcgccaatcagttgatcagtctcgaccctccccacaatagaaccgaatgtggagctgggcagctgtttgtcgggtgggggatggaggggtaaatttgcttgtcaggggttgaagaagtgaagaaaccaaaatggactgaagttttggatgaggttgagtgattaagccaatataaataggaagatcaatgagatctggggagccacctgggcatgattttcaatcaacctcgtttgtggacattgatggagttctagaccttacctaagctagttctggggcacatcatctattgtccactgtgatatctacatttacaggacatgttagcaaggaaccctgttatgacggaaaaatagtagtatatagtaagagactacttttcaattactactccgtatcatacttctgaatattcaccttgacctatgttatatatcagccaagctttgtcggtcaacacagcagctcctctttatatcttatgccagccctaatgcaatgcatatgatcctagctcgaaggttggtctgtgtctccgcagactaacaactaaatagaactagttaacaaatacaacataaagcttctttgtctttcttattttttttaaagagatttcgccgaagcgatccgagaaaatctgtgtcataggcagtgggtcaataatacccttaaagaactgtggctgaaagtcaattgatcgagattgttcattatttacacatttccagggtagaatagtgcatttcccctaagcacttggatcttaagttgactatatatgcgggttcgtggatatgtataacgtgccggctatattatccagtacgctaaaggtacaaatgcagccgggctatgcaacacagccactgaatcttaggcaattcagacaagagatataacctcatcgcatctaagagagtggagacaaataatgtacattatgtattgaatatccatctatccatctatccgtcgaaattatattataacgagacccagccttggaagagaaatggaattttcttcccgtaaaagagacttggatggtacctgggccttctagtaaattgtatggatgaggaagtaccccgggagtacgtgcattgagtcatattgcggcttagagcgatcaagcggggtgtcggggtcccaaattggattagcgtcgagtcggggacctcgaaagggaatggcggactgggagatcggagcatacatagaatcaaccgctaccttagctcttaggttccttcaccttccccggaagccatacagagttaccgttcctttcgtcttctttacgatatcctcgatatcttagtgtcctactgcctcaggatccttagacgtggcctgactaacacggcactctctctttgacttttcccttttcatacaaaatagatacccttggtgatacccactctacgttttcttttccaatggctttcgttgcggatcaattcttctctgagatggatgcgacaatctccaatgaatgggttgacttcgatcaattcctcgatctcccttcagcctacgatgaccagtcaaccgctactaccgtctcacctcaagacctagctctgccctatgaggcagatgggattttcacccccccatctgatttcatgcaatcctccttcgacatgaccaactgtggtttcccacaagaagagttcatgggaatggatggaggtttcatgcaggacccggctgttcctttgttcgatgatgcttcgttcttggcgtacaacccatacgacagcagcaacacattccggaacctggtggaggcacaggctgccgctgacccgcgtgttggttctatcaaggagaagcgccgcgaggcagggattgcactacacttgcagcgcctttgtgatgacactgctcttgacttggatatgtcctctgactctaacaccagcttctcatccccaagctggtcagaatacgttcgcgggagcatctctccgcgccctagcccggagaccacatcggtctccgaggcaccccctccaggaggcatggagatgattctcgacttgaacatgaacgccgcagccaatgtgcctaggaaacagaaacctcgctctcaggcacagaaggagaactacatcaaggctcggaagtacggtgcttgtgagaagcataaaaagcagcataagcgagtacgttttccattcacattaaccatttgatcaccctaacgttcgagtagtgcaactgcctggagaaggctgctgctcgtgccagcgatgttccgatgaatgccgcactccaaccacggccgaggcaaacgacgccccaagtcccgacctcagagtcacggtactcggactcgccgggtcaccactcattcaacccagctcaagcgcttcccaccattaaggcgatcaggaaaccaacaggctgcacatatggggtcgatccatctatgggactacctgtcgcagtacccaccaccaagcagaatatcaggacgaagactcaaaagagtacgccgcctggacacgatattgttctgctatctggcaagctcaattcaaattccaattgcacgttgaatcaagacaacgttctatcatcgagccgaaacgccgcgaagggtcattgtgccggacacgacatactcctatctggcaagaacatcccaaacaactcatgcgctggacacgagcgactcgtcacccaagagaagatctccaagagcacagcaagtggacagccccacaatacatgcagttcaaattcacctcggccggcccacgcagctggggtgtcatctggcagttccagcttgcgctggtgcgtttcgacctcgccggttggtgttgcatggtccgagaggactgtcaagacgtcctcggcgaaccattcaactgcttgcgacggtcgcactccaggcttggatgtacaacgaacaaggtccactcccacgatggcaagatccatggtgccaggtactgttgctggcagccttggaatgcgccattccactttgctacgcaactccggaacccagctacctggatcggatcacagggcctcagaaggacttgcctggcaaatctcaaaaatgtctggtctcctaccggtgccaaacgatctaccggtctcgccgtctcggcgtggatcatcaggtctttctggaactggacggccactcatcagcggagacagtcttcgtgttcgatccgctgctgaaaggactcgccgcctgcttaccagtactgccttggcattttctggtgcctggcaatcatcactgtctttggcatctggggttgaaggcgtggtttacaaagctttgtctctatttgcccgacatgttgtgtctgcgaagaagggcttatatctcggcggactgcggaacgctttcgtatagctgttctgctgttcttcgatgaacgtcactggaaggaacatcttccgataattggctggcgttgaacgatactgaattgtaaagggcatgggtgatatctattgtcacgttcgagttagctgtccctaatgatgaaatcaagcgaaattcatttgcattatttaatctccagcaaaccctgtatgttcgcagtaataatctaggagccccaggtacaattagttatatgtggtttcaaaagcaacaaccaaatatatcgcttccttcttagagctcccattgaatcggtaccaatatttatacgcaatcaaaagtagttcaaaatattgcatgtctgatgattatacggagcactatcgaggttattttcagaaatgatagacatcctttgccgtccccaccaattgagcctaatcccgcgccagtcctttttctcttgttcctgacggttcaaatcaacacgcatactttcgcttcgacttcaaaaccatgcactccccgcccctgttccgcttcactacagtgacggggtattttctccaggatgaccccgctacggaccccgacaccttcgactacgtaagagacccaaataattctgtcaaaaccattgtctgatgatctgaaaaggtgaactcaaacttcggcctcatcgaaaaacaatacgacgagcatctcggagtagaacagaccgacagccagtggcagcgtttcgacgcccacattaaacgacagaacgccagcaagagcaaaaagctcaaagttctcttcctcggacgccacggcgagggcgtccacaatgtcgccgagcgcaaatacggcagcaagaagtggaatgtaagtagccgagtatttcctccacgaatcaaccagacggcaaccagcactctaggaatactggtctctgcaagacggagacgaggacggcagctgggtcgatgctcgtctaaccgagcagggaagatgccaggcaaaagtcgcacacgcagcctgggagcagcagatcaagaccggcatcccgtcaccggaatcctactacgtgagccccctgaaccggtgtcttgaaaccgcgcagattacgtttcagggacttgcgatccctggcacggatccttttaagccgactatcaaagaggtgtgtctgtttgatccctactacggagcgtacaatctaacgagactagctactccgtgaaacgatgggtcagcacacttgtgaccgtcgctcgacggcttcggaaattgcagacgagtacccggagtatagatttgaagcggggttctctgaggaagataagttgtgggatcgtgaggtccgcgagtcggatgagcatcgcactgagcgactgcgtggtcttttgaacgatatctttgctcatgatgagagtacctatatttcgttgacggctcattcgggtgccatcaccagcattctggaggttttggggcatcgtcgctttgcattggcgactggtgcggtgattcctgtgcttgttctggtggaaaggggggtaccatcgcagctggagtcgcaagagctcgcatgatcggaggattgcaactttataactgacatgggtgctggggttgataaatattagagcagagcagaacagccagtctcaatggtttggtatccaagaaattgattcagtattgtacatgagtcgcttctactcaagaaagatgagagcgacttctcacaaatgcaattgtcgcctccaatcggctaatgaaaaaccactgtccacgcgaaagatctagatataaaaaatacaaacgccaaagcatcgatcaccaactgtagtactggttctgcgcagaaatcttgcgatctggcagttgtgtccaaagctgagctctgcgctcccgctgggccttggcctcacggtcttcccattcgcggatgcgagtcttctcttccttcaacaggaccgagagacttgtagtagggggacgcatgcggttgatctgaccacgggcgcggtgatccatctcatatccgtaaggaccacggttgacccaggcctcttggatgtagatatcagaggggttggcaatcttctgccgctcgccggtcttcagtatgacagtaatgggtttcgttggttcggagccagaagccccaaggcccataccggcacggacaatggcgacattctttgcgtgttccagatgttccaacacgtccttggcggcctttttgttgctgaagcgcatctggaggatggcttcgtcgatattctttccagcgatttggcgggcgagaggacccagcttcttcagcgaggtcttgatccagtgagatctggagagcgattcgcgctctgtgcgcttaatttgcacctttgtcggtacacggcctcgtttccggatctcgcggacagccatcttcctatcccatcgcagctgggcccgggggtcgggagccaatcccacttgcaggcgacttaagtcgcgatcctccaactttccggagataccttctttttgttcccccgttgccctggatggcatgggaccggatgctggtgcggcaaggtcggagccgaagatggaggttgctaaagtaccttcttccttcttaggggccgaaggtcggtgggtgactttgggtttttggttggatccgcccgtgaacaagttcttcaaggaagaaaacaaaccggtcggttttttgctttcgctatctttcacggcgtaacggatggctgtcgtggtcaatgttcggcgagggacgaaggagacggtccggacagctaaaggtggtaagtcagtaggggaggtcaaggatccgatatatcaacacaacatacctgtccggaccaattgccctgagcgatagaccattgtggctgttgggatgttgttgtcagaagttcacgtcgggaaaaaaggtgaaagttccctgcacttgtggtctgtgcgggacaccggagcctgaggcaccttaaattgatcgatcttctgagaatagcttcaagatatgcgacttgtgaccacaccagtcgatagaacaagaacaggcttatctacagctggagatgatgtcgtatatttgaggatcaaattcgaacctcattctcgcgacattactgtttcgtcttcccagccatctccacagtatccactaggcctcatctttccctcttccagttcttctctctctcttttcatcttccttcatccctcccttcacttttcaggccatcagcctgttgtttatatccctttcgaatatctgatattcttgagatttcagcttgccctctcggttcaaggactctcgttccctccaggcattcatttagattcttagccacccaccagaagcagctgcgcaagagtaaatctacgtcatttgccggaacaacaacgaaagacgatctggacacgaccggccgatgcaggaatggacgtgttgaggtacactaagaccgtcgtatgatctggatctccgctcgaaaagtacctgggatccattacgacaattcccagtatcccatcgcttctcccaaagctctatccaaatatggacatcagttcgcttctttcgccggactcgaatccaaagtctggaaattcgacgcccgtgcctggtcctacgtcgaacaacgcaccggccacctctgcagggccatccccccacaaagctatcgagagaacccggacaggctcgagacgcaagggcaagatctcttcgcctctcgcacagcacgtatatgttcctagtggagaatcttcgccaggactgagcggaggaaatgggacttctccgactgaagtacattcgagacaaccatccacgccgggaatggataccttagcggatctcgcctcgatgcagcaccaccagccacaacgtccaacaccgaccagcatgctccggagtactgaatcctatgagcatcagttatctccatctactattcacccccacgtcaactctatcaaccacaacacccccacctctcggatgtcgttcgagctcgccatgtcggatgggcgcgacgggcccgcgaagcggacctacgccgcgacttcgcttgatccagatgcgcaacgtttggcgaccgaactttttcatcaaatatcgctcaacccccacacgcatgacgcgcacgtgcaatttatcggcttgctgcatgcaggattcgttaaccacgtctaccctccgaataacccagatgtccacggtgacccgcgacgctatgatctactcaacgatttgaaaacagcacgcgaggaaatggacaagctgttcgcgatgggagaagatctttgggccgaatggattcaggatgagagtatgttagcccaagatgtcgacggtcgcattgctgttctagaactctgccagcgatccgtggtagaggagtttggcagcacaaaattgtggaatatctacggcgagtgggtactttatctctacaattccgctcatggcaaaaccagttcccagtggaccgaagaggatcgcatgattgggcgcgaggtgttcacatgggattcggtcgtggaggtgtggcagcgaggtgcagacgctaccaaatggagaatcaacaacagccacttggtctgggatcgccttttagatctttatgctcaggacatcgctcgcgaaccttctcaagagaagatcaaccatcttcatggactgtacagtcatcgtctgcaaactccccacgccacctgggaacagaccttccaaaagttttcaagcttcatttccgcttattgcaacagcaagtatgaggagattatgtgtgaaactgttgctcgcgcagcggaagcaaaggctctcttcaacgcacgggaggaattcgaactgcgcctggtcaaagcgcaagagtctggcgatcgtagtcttgaatgggctgtttactccgagtacattcactgggaattgacgcgcaaccgccggaaacgaggagaattcaacttcgaattggtgaacgccatttatcagcgcgctgttcttcacttccccaccgatgtttcgatttgggaagactatgtcatgtttttaatcggcgaatctattcatcgccacgcttctaccacgacaatctctaccctagaccgtgccacgcgtcattgtccatggtctggaaacctgtggtcccagtacctgctaagctcggaaagagaaaatcagtcgttcaacaagatttcgagtatcaaacacaaggcgaccagcactggactacttgatgctggtggtttggaggaagtcttgaaggtccacgtcacctggtgcagttaccttcgccgacgcgcctttttgtccgactcgaccgacgaagatcttgatgttgcagaagttggcattcgctcggcaatcgaaagcgtgcaagaactgggcgaaaagaagtacggcccggcgtaccagggcgatcctcttttccgtctggagcgaatctatatccgtttcctcagcgaaagcggcagttgggacagcgcgcgagagactttcaagggcttagttgctcgccgtggcaatagctatgaattctggctcgcctactacgaatgggaattgatttgctggagcaaatttgtgcaaggcgaggcaactgtcgacgcagcgcgtcgaacccccaacccgagctttgctactgctgtgctcaaacaagcgatcaaaagaacagatctagactggcctgacaagattgttcagacatatgttacacattgtgaggactatgaggactcagatgaactccagctagctgtgattgagactcggaaagcgatgcgagctgtcactgcccgaagagagagggaagcgctagaggcagccgcagcacagcagcagcagcagcaacaacagcaacagcagtgggaggccgcagtgcaggcagtcccttcacctgaaaagcgaaaacgcgaagatgagaaggacgggatgccgcaaactaaaaaggtccgcaaccaagaggcactggcggaggcccctgctcctcctccacgggatcgagagaatgcgactgttatcgtctcgaacttgcctaaaggtaccactgagaatagcgttcgtctatttttccgtcatgtaagtgccttatccaattactatcgggagaatttagctgaccaaacagatcggtaccatcaataccgtcaaaatgctccgtagagacgagaaaagctccgaggttgcgatcatcgagttcgagaccaaagaagacgctcttgctgccatcactcgtgaccaaaagcgcttcaacgacactgataacatcatcgacgttcaaattgggtcagagacgacactttggatcaccaattacccaccggatgcgggtgaggactacttccgcaatcttttcggcaaggtaagtgcttcaccctagcctttgtggcaaagctgacttgagcagtatggcgaagtacttgaaattcgaatgccgtctctcaagtttgacacttctagacgcttctgctacttgcagatggatacctcgagtgctgcccaccatgcgacagagcttcatggaatgcggttcgaaaatggtacgcggcttagtgtcaaaatatccgatcccggacaaagaacagcccgcagtggccccagatacgaaggacgagatatttatgttgcaaacattgcctgggatgctaatgaaaaagatctgaaagaactattttctaagttcggtgaaatcgaaagggtgttgcttgagcgaaagacgaatggtgccagtaaaggttttggctttgttactttctctaccaaggacgctgccaatgatgccgtcgcaatgaatgaacatgtgttcaagtcacgtcctcttcgtgttgaaattgctaccacggacagccggcgtggtaaccaactcgtcatctctcgagttgcatcacacccggcagatcacggtgcccgtggtcttgaagtgccagttggtgatcatgcacagcgcacacttgctctgatgaatgtccccgataccgtcaatcaagcccgcatccgtacccttgtcgaaccatatggccgtttaatcgcgatcaatttgcgcccagaacatcaaggtgctattgtggaatatgtcgatattcaggacgctggcaaagctgcgttggcgctcgaagggaaggagatcattgctggacgccctctccatatcggcacggttcgagagatgttgaatttgcaaccggaagtcaaaacagaccgagggcaatccgccaagcccgaacgtataatgaagaagacgaacctacaacttactgcgccgattagacgcccgcagcagcctggcgctcggaagggtggtggtcttgggatgaaacgacagatcgtaagttccggtcagaaacaatctgctgccactccggccagcgacaaaaaggacgcgacgcccgacggcgagagcaaaccaaaaaagagcaacgatgatttccgcgctatgctcgcacgaaagggtccggaatgaagtgcaagtgcaatgatagcgacaactatggcgcaatatttttttcggcattattcattcggctggcgtttgtctgttttccggtggtcatcttgctgcttcctttagatccgtatgtattcactcgggtcggtcttttccgtcatgatttcttctttgtttgtggcacatgccgtcgtgtatattatgactgtattgctcttagttctaatgatgatgtctgttccgaggggctgtctccgagacattgccccggtgacttgaaagaactggtgatctatatactgtagtatatcggtgattcttcgattctttaaacttgactgtatgaagaatccatgtctcatttaccatattttatacattatcgctgcagaatggaggtgtctgattggactatatgtcacgatcatgcaaaacacattgacgtcaaccggcttcacttggtcaacttcttgattctctgcggggaaatacaaaacaccttctgatccattctaatgggttgcacagagatttattgaaacaatataccccttttcatctatatacatctcctcgaatcgctaaactcctaaagtctcgcgtgatcctgattcttatcggaccgattagcccctctcatacggaataccatccctacctttacccgcatcgtctctatttcctgtgtcttgcttgggtttaggcctattgacacttgtcataatatcgctgctctacattcaatgtgcagagctatcaccaagcaccgtgaatattccacgtcatcgcatacctacagcaatggacttccacctagtacctcgcggtaccgatcggaactacacaggatttttcacaaagacaatagtctacatcgggacgctgatgatatttctagcctgtaggcaaactttagcgactagccagacactcaaacttactaacaaaatctcccagcatttggcttgacagtatcctcgatcgtcattccaaaatgggtcagctaccatagtgaaaaggtacgatgtttttgttcacccccgacaagctcctactaacaatatgaacctacagcccgatatcgaatactcctacggcctttcccgccgctgctcctcccttaccaatacctgcgagagcttcccacaacgcgacgactgccacggcgaagacaggtacttctgctctatgtggcgctcggtcgggttcttgatgtcctttgctgtcgttctgcagagcattagcttggtcacatacctggttatcctgtctggcgggaaacagctgcgcgagaatgggtggagttttcttagtttgatggttgctttgtctgctattgtgcaggcagccggaatgtcgatcgtggtgggttgataatatgtctatatctgggcccaagatgacttgtcctaatggtttggtttacaggcatatctattcgataacgaggaccggttcttcatcggctggaaacttgaccagtcctggatcctttgcactgttagctggtgcttaagtgttctctgcgcaggcgcggttattgtgtctggtaaggtcttgccctcagagggcggatacgagttgattcctgatcacgatgagcttcgagtcacttgatagtgcccaatgtagcattcatggctcctggatgaatcacgcgttacgcaacagacgaaggatacctatctaggtatcattcgtctttgacgacttcttataattctgctatttcggtggttgcagattgacgttttctatcttttgatttcgtgcttcggcgttggggctgtatacgtcttttatgcttttgaaatataacaacacaactaatatggataatgatttgaataatatatctctctatggcaagataggtttatcatttcatatctttgaagacatgtagaaaaatgcaatgcgacgtagaagcttcatcattcatctcatacagtacatttcctcattctcaatctaccagacaatttctttcccattcagcccctcaatagccggaatcagtggccgcagcgcttgaccatagtcacccccgttcggcgtgcgaagcagagtgtgaatgtggaatttcttcggctcctcattattcaaaaacacaccagagtgatgatcaaactcaacgaggatcaccggattctgaatacggtaatagaatggatcctcatcaccataccccccaatccaacaaaagtacgtctccgcttcatgcgcgcgcacctgattaatcttcatagcccgcgatttagccggcaggtaaagcagatattgctccagaatgccgtacacgagctgcttctgcgcagtactaaaactcgacacgagaataccctcatacggcacctcccggttgtcacggtacgcaccgcacagatggcgctggtcatccttattccagcgaccgggcggcatggctggatctttcatgtgggcaaagacacgagcggaagcctgcagctccgccgagagcgactgcatcagctgcaacccgagcttctcctcgatctgcaagatgcgcgtgccggcgtaagggccagcgtcgatctcgtttggctctgcgcctgtgaaccacggcgacgcgacgatctgccctttatacaagaagacgttcaggcagagatgatggccgtagaatgaccagccccaggggcgtgtgattgatgggcggccgaacaggacgaagttgtaggagaattcgttcatcactgctggcgacttgactagctcgccgaggaagtggttgatgcgcattgcgctgacggctttttcgtagccttctggtgagagcgttgtcttcaggacgttcatcactgcgtcccgggtctcgggggtgacttcgtcgagccgaatgcccttgtccgcgagtaggaactccgggttcgaccatgtgcgccattgcggcgagtcgatgtggtagttgatggcttctttttgcttatcatctagcaggctggttacggcttctgctgcgtctacaatttgttgaattgggacgtcttcttcttgtaatgtgaagagacccgggcggacgtttcctgtagatgttagaagcgttctggtatcgtttcagtttagctcataccatcggtggtcacgcctttgaagggctcttggaatagctctagccaatgcatatacagtgcatgtagccaaggtggctgatgtccggtcttaaattcgttcgcgtattcgtgcgcatcttgctggcacatcgcctggaagcgcgggatattgaggtcaggcaagtactggcggtactcgcctgtggtatttttcgatgcattggccatagttaagaatgctataaaaaaataaatcaagagagatgaagagatatcaaggtgttatagcaacccgagaccccacatcaggatgaccggtcttccccacgctcgtggggatgggaaattccttatccgctctggcaagatggggcttctggtctgaccaccggaaagatattatgtatttggagaaatgctatagacacactcttatggtatgcctatagtgttcttagcacgaccgcaccattaagtacccttccatacctatgaaaagaacatccgaaaagacatataaaagcccaagtctagagaaactgcgaaggaacaaaagatagacttcattcgcacagaagaaacgatatatcagatattatacatgaattaccaggctacttatagcctatgagctgtttactgggcaaccaaaaaggtatggacatcccgcaactcactgagcctctcttcttgtgaggactcggatattccgagtgattctccgcatgaagtcttccctcatattttgaaaatcccataactcttgtgcgtcttcctgagagcttcgaaacacgtattcccccggaccttgacaattgcctgatttaatcccggacttttccccggtcacgtgcagtgaggccggtccgggatttccggcctcacccaattgtcgtcgaagaatataagcgcaacgctcaacgtcgttattatcgtctgaagcctattggggaatgtctcgatgatgcagaatcctcggtctccgatccaacagcctgaagtcgagcagccggccgctaagcgcatcaagcggccgcgtgcgactcaagcttgcgacagatgcaggttgaagaagtataagtgcaatgagcgatatccgtgtttgcattgtaaaagtgagtgaccaggttataattagtggcggcatttctctgacaattacagaaagcggctgggattgtgtgtatcagggaacttatcgagagcgtgaaagtagccggtctgcaaagtaggtcgatcactccgcatatccagtatgtttgctaacactcatagttatgtcgccgaactggagaagaagctggaagagctgacctcgaagcttcgtgatacggaagccaaagcttcctctaaaggtcctattccaccagcagctgaaacgttatgctctatgcgcaattcttccacgccacgggatgttccggcaatatccgaggctcgtgaaggacctagagaaatttcagacaagcagactcaagagttcaatcacatcaacaccattgaatgtcacagtagtacgtccccggctgcagtcattggccatctgaagaaagagcttgagccaaaataccaagaagagcatttttctcacgcagctgattattcgatcatctcaacactccgtaatccaaacttgtctcctttatacgccactgggccggggcagatgctgtcaattgaacagtcaaactactatttcgaccaagctcatatctttatgaatggatattttgagagcattcacttcatccatccgtttgttgataaggaggactttttcgcgcgtgctaatgatctttggtttaatcgatcacgcaagcctgagccgagttttgtcgctctatacctcagtgttctatcgcttggggctttggtgcgtgtatgggatgaaggtaccttggccggcttgggtcggtttgaatggagccggaagctgtttggggaggcgcagggatacctgaacaacctgcggttttcgaatgatctcgaaactgctcagtgtctttacatgatggtgcgtgggtgtttctctatgcgtgatcgcaagctaacttgagcaggccaaagtttgtcaaaatgaactcaatccaaattgtaagtgttcattctactttttgatttcaagatctaacagaacagtggcctacatgtatcttggtctcgcagtacggacgtgtctatctgccggctttaatcgagagattccgtgtctaggagataccaccgaacgttctggatggatctcaaagacttggtggtaagtggaaagtttgtctctcgatataaattataactctaacgaggtgataggggtctgttctctttggaaatgtaagcatatcgtgcattatcgttgttaatacttactgataaattagtgagatgagcttttcggttggacggccagacacccttggaatggacgaatatcacaaccgcagcattccaccacgcgatgattctgaatttgccatcatcccatggatgattgattttgcgcagatcattcgacaagtatctgttcaaatctatcattctcgcatctcattacaggacaagttacaacttgctctacagatcgaaatggaaatggatcgttggctagcgaggcttccagaaatgatcaaacccgacattggtggatatagaccgtctcgtagtgccctgcgcgacccgaaatgggcacgaagacaacggcttgtattgggaattagtaagttatccatgggacttgttaactaactcccgactaacgaatttagggtattataatgtcaaaatgttgctcttccggcctttcttaagccactttccgcgcaaactccgacattctccaagcgaattggaccaaacttttgacaaatgtttggacgccgctatgaagactctccaggtgctacatgacctttaccgagttcacacgtttttccgttgctggtatgttcctttgccgagtatcgttcctttgctaactctttaggtggtataacacaacctatataatgcttgctacgtcaacactcctccttccaatgtctaggctcggcatgtgcgctgaaactattcctttgttgcaatctgtggaaatgggcgtggagatcttggaagccatggatgaatgtgcaacatcacaaaagtcggtagagattatcaggcagtacctcagggatttccgagcatccggagcttcacagccaccaggagacgacgaagcccaatctgaggcgggacaggtatttgacgtgccagtatgtattatcgtcctgttttcctaggatttgctgaccatataggaatgggcttatggtttcggtctgccagattattctttcgagggaattgctcagctatttgacgatatgggagacatcccgctggaataatgatctcatatacccgaaaacttctattctgtatatatttgcaccagtgccacctggggttttgaaatctatttgatatcctacgatcttacggactatgacgtcttcacaccggttggtttttggcaaccacagactcaacttcttttatcacaagggcagcagcgagccatcggaactaatgtgatgtcggcaattgttcattgttcattgcgacttggaatgggtttcaatcgacatgctcaccatgtgctccgaggccccggaaaaaccgagcaatcagccctctactcggaaaagccgaccgaccttccattgaagcaaatgaattccctgaatctctggatctcactgaatctccaatctctcattctcggagcctgctctcagattcgaactcctaaaactcctatcaccatcagaaggcggtgtgcgctaacggattatctatcccgccgatgtcgtctttacatccatccctagactagatggatatctcaccactatcatagaaggtcatcatgaacatcgccgatgatccactgcgtcctcgagaattagcctcattcaagtttcagccctctctcagtcgacatggcacgcgttactctcttctgcttgttcttcgactcacttgccataccgctgctgtagcatcaaatcgctgttgaatcagacgcctttaattccggaatcttctcaagttatcgagattgttgagaagaactcgattgttcttgaagggtatgcgacttggacaatctcgcctaatagagtattgaatcatgactgcgacttacctacgactaaaaaaacgtcgcctcgcaaagttcatattggagagtcttgcccgggagtttgcagcttatcaaatgactattttgatgactggccagggcttcaaccgctaacaaattccgccggtaattacctcgctgtcttcgtgcttggctggtcatatatactttctgcaagattgatagaactccgtcgaagaacaaatgaagacaaggtcgtctataccgacgagatggcaccatggaaatcaggccacgattcaaatgctagcgactactttgagttagatattgggggcgatagtgtcgctgaaatgagatggtgggctgcaattctcgcaggtggacgtggctggcaggctactcttcttcgagggactgaagcctagttcccgccatgggaataccatttgaatggcaatgatttcaggatatgtcatgatacagagttgccatattttcttgaacccccgtcttcggcagttgcacgagagtatctttacaactttgccagatgtcacgatgctttcgaccaacttatctgtgcactggctgctaccctgatgttgccaatgtatggtcggtttggtgctgccattgttttgcctaggcctatgcggaggcaagactcgcgccagcaaacggaaacactctttgccgatcaaatccctacattcgatgacatttctcggtatatggcattttcgggtacgtcaggtctacttgcctcgtgtctatttgaaggactctgggagccgggtattccttgcaatttggctagtcaatggctcgatcctgccatgaaggaaattactccggcccttttccaaaggaaacagccccttcctgttatttgggccctgtctgaaagacgccctaatctagcttcgttgtggttaggtgccacaattacaggccttttgccccaaataattctagtatctatgtgtttcatgccatcaatttacctcgaaggagtggcatggacgcaatctcctcaatcctttatggattctcctaaccatcgtcttgttaaaccctatagaaacggtcagagggtcacgatagctagagaggatgagttccgtctcttgtttttgacggacacgctatcggaaaaatatacagtcccaccactttgcccttattcaccattcggcgaggttgatatccagaacacctcccttgaagtcagacttcatcttgcttgcaaccacaggctagtatatcgttcttgggaatggcaatgtcaaaaaagggagacgttaagcgattttggaaccccaaccgattcgcaatcgctcaaaaagaatctcaagcatatttcacttctgtcaatctggattgtcacaggaattgcttgcggaagcatgttcaacaaaactctttggacatctagtttcactcatacggtaagtagaaggttgtctcacctatcgtttactacatgtcctagctaacatgggaattatagcaacgtagcagttttacctttctaggtagccttgcaacatcatgtattctaccaagatctttcaagcttgttgcatacaaacatattttgaattttcgcgcttgggcggccagggccatatcgatctttatctcgaagatacgtccacatgcgatacagcagaaggaagaaaagagtttgaatgatcggctttctaggattgctacacggaacttgttctcatggacgctgttcatcgatggaattcgaagtgaagaaaaaccactatggaaacatgactgattggaagatttgattgaaagggatcttagtgttgaatcgagtgaatgcgaagcaaaacaccagaacactgagtatattgaaaagtggctagaagatgccggtatacggagccaacctgtttatcatagccagattcgtcaacatacagatggcgcgaccgaaattcggacggttgtggtagcaattccataaacgctggttttgctctctcgccctctgacgagccgccttctttgtccaaatgctagagatcaatgctcgtgagtggatccaagttttcgtggggtcgagagtccactactcatgtttgatcggaattggtctaactgtgtatgggggtcttttcccgatggtccgttattggcattgaaaaagcgatgggactggaaaaccggatcacagccgacgacacgaatgccgcatctgtcctccgagatagaccttgttaaatcgctcactgtgtgcttgttagtcaatccaaacccacaaaggtggcccatcatctaccccaggttgccggcgaaaacttctgtgtaagactagtctattttaggaaggtttccctcaagagaaagtttcctatttaggacatcttctttactggaaaggtttctttgctggtttccctgccagggaagtttctatattaggaaagtttctataccaggaaagaaggaccatactgtaacgaagacatcctcggcaatcaaggcattccagaataatcatactgcagaactttgtagatgggacattgataaagatgggggacgactgttcgatatgcaaattaattcactccgacgatccgaagaatcacgacaatgaatacagtgttgaactcacgcttactcgctgttgggagcgaggatactatgctcttatccctggtggtcgctgcattgctctacttcttgttacaaagccttattggcatcccagaatatgaacaggcccgtcttcgagaattgtacagcgttccgcaacaacatctatttccagcaggggtgccttgcaatttgcaaagacggagcagaaacatttgtgatactctcatgtctccggcggtaagttactatgcgttttcttttgggcaagggcaacccttcatgagatgaaagctgtgactaacaagacacccagaatgtaagggctgttgtcttctgggcatcccaaagcggcactgcggaggctctggcatctcgctatgcctctgaactttcgacggcttttcccttgggggcgatgactgccaacctggcagactacgatcataaacatatgccagacgtaccgtctcaagcactcttggtgttcatcttgtcgacattcggtgacggtgaccctcctgataacggcaccgcgcttctcgagtcccttcaccagcttcgcaagcaaagtgccaacttgaacaatgttcgatatctcattttcggcttggggaattccaactatacccactttaacaaatatgcgctcgatatcgacggtatgctgaagggtatgggtgctacgaggctaggccgagttggtctgggtaacgatcgtgaaggcgccaccgaggaggattttgtggcctggaagaatgagagcatccagcaagtggccagaacattgcatctgcggcccgtggaacgagaatattcccctcgcatacaaattcgcccttggcgaggtggcaactgtgacacaaggcacggagtctcgccaaccgtttattatggcgagccacagtatgctcctcccactgctgataggagtaccaccgttgttcttcctgttatacaggcaaagcagctcatgctctccaaagaggccattggcgagtctgagagttcacgggaatgcgttcatctggaattcagccttgaagaccacccctccatcacctacgagacaggagactacctctgtatttggccggttaatccggaacaggaagtctcggcgctgctgaaagttttgggcgtttggaacacgcgcaagaatgttatcgatatcgtaccggcggacgatacctcgagctcgaacattcgaatcccaacccctacgaccatggagagtctgttccgttacttccttgacatatgcggacctgtgtctagggaactcgtccgtggtattgctgaattaacctcggatggtgatttcaaacgtcgactcgaggcactcacaagggatcgcgatgccttttacgaagaggttacgttgaagaagttgactctcgctgcagtcttacaagcggccacgacggtacgagatgaaaatggatcggcaatcaacgtagctgtgtcgtacgtcctagagaatctaaaaaagctacagcctcgcagctattccatctcgtcgtccgccgctgtggacccccgtattgcggccatcacagcactcgcagtcagtggccctcctcgtcctcctcgcgagacatcgtcgtgtccttctcatcgcttccgtgggttagccagcaattatttgttgcagcttcaaaaagaatacaaccgcagctattcaaggtcgcagcagccaacaaactactactactcaactgcagggccccgtggtctattggagggagggaaggttttcgcctatatccgccgaagtaacttcaaactgccaccagacccatcaactccgatcatcatgatcggctccggaactggcgtttcgcctttccgtgcttttgttcaggagcgcatgaaactcaagaatcaaggatgcgaagttgggaaaacagtactgctggtcggtcaccgagctccagaccaagactactactatcaggatctgtggcaagaggcgagcaaggctctagggaagaggtttgaagtgtacacggctttttcacgagtcgatacacaaccgcgccaatacgttcaagatttgttggcgaccaagtccgacctggttctcgacatattggctgctaatcaaccaaaaggtggagttatgtacatttgtgggtcgtcgctcatggcaaatggagtgaagaagtctcttgtggaaatctgctctcaaggccatctgcagtcggttgctgaaactgccgaaaagtgggttggagaacttagtcgcctcaggcgtttgcaagaggattcttggggatagggtccggtgatggatggtttagatcccatgtgcgtctcagattctgttccagagcatgatttgcccaggcattttcttgcttgcaaagtctcagaagctccagcagctccattctctccgcagggtcatgaatccatctgtggcctgtacaagttagctaggattgaatgaatataggagtagatttccgaaccgagggtgatagcaaggcacgcaatgacctttccaattggacatgtgttaaatcgagctgctccacaaagaacacggacgtggtcttggacctcactctgcaataattttggtcagaatgctactttgaatcgatgatgtgaaacagctttccagtagccacatagtcatacctccatctctttatgatgatcaatggcctgtggaccaagtgtcaagcgactcggattgtacatggcaaggaggagttgtgaaagcctgaaatgtacataacccgtcactagataaaagtaagcccatacatcaaacgagcaacagacccacttccacacttacaacaggcgttcaaagcgaatcttatttcaggcaatattctgccagtcttcaaatcagaatctgcgaagaatacgggttgaaacgctggccaagatagctctgaccattgtgtcaacattcgttgcagatcctcgaagtgttgcttgcgagactgtgcttcgtcatttccaaaacaaaagtcggcggtctctcctgctagcttctgcgatcgctttgtccacgtatagatgtcgtccgagtctccaggctcccagagatgggtcacatcaaggctggtacgagttggcttctgctgagaaatagagtggaaaacatcctgcctctggtgaacccagaatgctgacttggccaatttggtcactggttgttgcttatcacttgctatagtggcagcgaagacgtggccagccaagagatgtgactcagcgtcctgtccatcttgtcgggctatcaataaggaataagtaaaaatcgcgtttgatacgggccggaagcagattaggtcgattcggacggctacctttggactcttcatacaagcgtagaattacgactgatgcaagcccggccccatcggaaagtcggaccgggtcatgcattagcgctaaaaggatgtcaatggcctttcggtggaacaagtcggctcttccatcgttctggccggttgctttgcagtggtagaaagatgacactgctaagatagagtaacatagaacaggacagctgggggcaatccgaagaacttcaagtgtgaaatccgagtccgtgtgatcaaacctgcatcaatcattgccgctatggtcaacccaacgtaagcgctcgacatgggattatctgatagcaacccaccatggacgtcctatagattctccgaaatattgcatgagatacgcatcctcagaggtaagcagtagtggtgaggatgttgacagctcgtttccaatacgctgttctccggcctgcgggctcgtcccagggctgatgctgtggaacctatcttgatggattacgttatccgcggggagagactcgacgggagtctggggttgtgaggaccattggggcgtctccgatcggtccgaccgggttaactgctgagaaggttctaaagggggacgggcatcttggtctagccttgggctaggcagggtgcgggactgggagtcagggggcgacaaaggtgtgactggagggacccagtttctacgagttgagaaacgcacgttgaagcgccgagtacagggacgaccggctgtacggcatcgccgacacgaaggggttgcccggtcgcctgagcaatgtgcaagtccgaattagaaagtgccatccagtcgaggaactggtcagttgtgactaacaagaaatatgtcgtatgcggcaggcttgacagacagagctctgatccttaggtgaaaccatgctctcagacaagtaagcagggactgattggatcgaatagcatcaacgatgggaagctaaaggcccgggggaggggaggggcaaggcgacggagacacttaaaacttccccaactcagtaggtggaagactccagtatggattagcgagatatagtgccgatctcagaatgggagattggggatactactccgtagtagtatgtggaaaagattccacgggtagctccacggcctccacctttccttagctcagaagggaaagttgcctatttagtactagtacttggcgatgtccgagcctctgcatcactttgggatagaaaagttgccttttcgagcgggattgtcaccagctgccgattccacgatgatacgaactcccaaagaacagaagtcagatgatgattgatttgctgcatatatagcctcactaccacccgtcgtcatctggaaaacaaatatacctcgcccaccacactgaaaccgactggcatcatgttgtacatcacgttcgtcgcagtaactgttgtcttatgtcctgtggcgtatttcggcttctgcttcatcgtatacttatacgatgcaaaagcccttcgtcgattccaaaacttatcgttcctttctggcctgagtgatatacaatgggtatgggagtcgattcgcggtcggcgatataagactcttcatatggctcatcaaaatgcgacaattgttcgtgttgctccgaacgttctttcctttaatcacccaaaagctgctaccgccatttacggacacggcaccccaaccaccaaatcgcctttctacgacgctggtcatggtcatttcaagaatgtagccgacacgcgagacaaagaagaacattcccggaagcgacgacttcttgccaccggttatgctcttaccacactccttcggtgggaagacaaagtcgcgagccgtatcaatgctctcttgaaccagtacgataagttctgtctccggctagatgtcgcgagaagggcagatgctattccagtggatcatcgacggtggatggacattttcaccattgatgcgatacacgatattggcctcagtgcgaacctccgcctaatagagaaaggcgatgatttaatcgaggtccaaaactcgcgcggccagtcctaccagtgtcaattccgcaagtcgctgtgggggtgagttgctcgtccctttaagtttcttttcccctagggcgacccatttactaacatgtgtgctaggaacttgcggattcatgcctcatttgcctgggctccgcggtggtacggcttgcttaaaagactcacatggtgggattcgcgatggcaagacaacgtggccttcaatgatatcgtcgccactgcatgcaagcaccggatacagcgccatttagcaggagagaaactagatgactttttctcctttcttcttggagacaagaatggcgtaccgaacatgctgatgctaggggaaatgacagcggagtgttctgttatgctgaatgctgggagtgagaccaccggcatagctcttagcaacctcctttacttactcattgtcaacccaaatgctctcgagcgactgcggcgagaagtagacgaggcactggacggaatcgaagatacgaaagtcgcgcccttcgccagaattcgttacctgccgtatctgaaagcgtgcattgacgaggggttacgacttctgccacccagcgccaccacaactccacgatacacgccaccgtcgggtcaggacatcatgggctactggattccgggtaatactgaggtgctttgtcctacctacagcctccaaagaaatccagagatattttcgaatcccgatgtctttgaaccagagcggtggttgagtgacaacgctaaagatctgcacacatcgtttctccccttcagtgcagggccaagggcttgcattggcagaaacatcacgtacatggagcaacaaatgttgattgcatctctggtgcatcgctatacgtttgagttgattgctcctgatttcaagccagcgtatgaagaggccgttacgtgctcgccgggtcctataccgatctatctttttagacgagatgaaacttagaaactcttacgtagatggcgaatcaatacattgaatccaaattgttctggcatctcatgattttcatcgtatagcgtgatctttggggtgttgatattatgagtttggatatatagagccttttgtgacaaccacctttttgttagaaattctaaatactacctatattgatttaaataatatgcccagacagaatgtcaagataccgaaaaattcccagaaaagtagttgttcctcgtatataaaatggtaacatccagtgctttcaccactaaacgacaaaaaggcatcaaccaaatacaatccgaaaataaaaacgaagtcaaaaacaagacaatcaaagaccccaaaggtgaagccataactcggtagccgtccacaccgcgcatctctcatgaaaccaactaagccccctccaatatctataaaccgcagtctgattctctcacgaagagagtaattccatagttcacccaagcaatgagcagactgtgaaattgtcaagccaaaagaatatccagacccgccctcgacgtatcctctttccaatatcctcgcatataacaggatcacggattcggattctgcggcttattcatctcgctatccatgcgtccacagctcgtattaccacgaccatcaccgtatttcgcatacgcccgagcgaccctcggatcgacataagaattcgaagtagacgagctgcgactcagtgagcccggggatgacggggctggggatcccgaggatcccggtgtttctgcagatgcagccgccgttgctcgggctgcggcaactgcggctgcagctgcgggatggcagagcgggcagggggagacgttcaagccacaaccgttgcagctgcggcagattgtttctctgggaattgtgttagggttgggatggagatgtaaagggtgttttgtatatacctcggggcattccctgcacaacctttgcatgtgactaccttccgtcctccaacacatgatctgtgatccggatcgaggttgtacatgaagtgggtggaagtggccattgtaatggatgtagagatagaagggaatattggaaggtaaagagtgtagatgcggatagtgaagtatagtcaagatccacctgatataaattgcagatggctttgtggtattcttcccgttggtgctttctttctctctcaatggaaagcctgtcaataaagaatagccagtaattgtgagccctgaaagtgttgttgggaaaggaagacagtagttataggctaagtccaaagccagaaatgaccgagaaacaacggatatcttatacaagaagaaattaatcagtgccaccaacgaacttcccgagagtttccaagtgtcacatattcgatatgcacgacggagcgtggaatcgatgacaggaatcaggattgagtccaccagaatgatcagcaggccaaagcgagagacggtgataggacaattcgccaggtacatgatgtacgtggatattccatttacacgcatggggccattccactcaaatcctccagttattcttgaataaaaagcaaaaaaatatgatccaacatgagaggggaacgacacagaaaccgttctggacttagttgagttgtcaaacccccctgcctacgtgcttctgtcgagctaaggtagccagctgcggaaatacagggttcatgaaacaggacctggtgggggattggcgtttctcagtccacacgaccgggcctacgtcgttcatacgttttgcaaagggttcattcgatggtcattctgtgggagggtttttagcagaaaacatgtagtgaaaccaagatatcgccaaattggcaactcaacccttgatctatcgtcgggcagaccgtcgttcatgcgcggaaaagatgtcctggctcctaggagcatgactgccacctcgtgatacaaatcttgaccgctcaaactatataattatcctcccgagttggaaggttgatatggccacgagtatgggatgtgaaatgccaaccacggatagttgcattgggccatgcgatctttgggatgatgtatagatgataggggccatggatagattgtcgatgatttcttcccgtggaccttttggtcagctctcgtattccccttgtgggatgagctttctatcccaacaaatcaagtaaagtacggaataccatgcatggaagttggatcagacggtcagcagcccatataccggattcggaataggattcaaggacttctatggagtacgttcttaagacgtagctgtcgtaagcagcaaaagggaaaaggcacggtgacaatctcgtgcaaggatcaacccgatgcaatgatcttcataatccatatcccattgagaagccatggttgtaagcacaatctccgataactgtagggccgacacaaacaaatccggaaaaaggaaaaaaaaaagaaaaataactgaagctgtaaaatgaggtgaaaagagagtcctgtgagaggtgtgagccaccaataaggaacaagaagaagaactcgaaattggagtcacagccaatcgaagttcacagacagccctaagccggaagcgtggatgtgacacttagcctcaagcaggtaaccgtagaggggctgcaaggacaggggcaccgaaaaagcccagaaaccccctttaacatttccagtcaacattgcaaggattccttgcagccgtttgacttcacgtcgtcattctgaacggacctaaagcgcttctgcagattggtcacatgcagagtgagtcctgtggaaatgacacacatccatgaaaacctcgaatccactcatctcggagttttgtatgcagtctgccaccggctaaaagctcaatgtaacctaaaaatgagctcagatagaaccaacgggtatgcgcgtcattaggcgagccgcgagataccaaaaatttcagcctctgggtgatcgtactgtatggaagagagccggaaaaaagcccagcttcaaacctccatgggcttgttcaaccggttcgctgttggggaggacacctgcagccagccacttccaatcacacgctagcccaggattcgaagtccaaatttgaagtcgggctggagtcaaggtgcatgggcggcaagttgcatcaacggagaagtttccatcgatgtctcaaaggagctatctgagacttccggaggttggttgtcctggaaccagaatggttacaaatcagctttcggcaattagtgtcacgattaaagcccgaggatgccgggggcgaggaaagaaaataaaaagaaattatgaaagtcgcacgtaaagggaaaaagagcgacttggttgaagtcagctaatatgaacctgtaggatacctgcagcccagttcgcattgttgctgcaagaggtgagtctcggtcaccttttcttccatggcgtacggaaatcatgccaggcaaatgctgaccttcgaaagtgaaatgatatcacggtgcatttccaaatgaggccacccaagactacccgaaactggtacctggcaggcactgaaatgctatagcctaaagaccaggtggctcataggtttacagattacacgatgcgcagtcatgaaataaaggattgtcattctccattacgatctgcatagctatcacatgggaaagaataaggtgctacgtggcattccatcttaaagagtcgtgtgtgtagccacggtaaaaggggaaaataaagaaatagggcagaaacaaattatccagccaatgaacgccttcgtggctgccacggccacaacgcagtgatcgggtgaggatcttgcgtgcttgctcatggagccacggcataaaaacagcaaagggggagaggggggaaacaaataagcaccatgatccatccttccacgtaaagccaggacgcctgggtaattccgaaaacatcaaatcgttggaatcacgccgaaactcatgtgtcggcgttaaatcataagatatcaaagggcagagagcagagagcaaaagaaaccgaaataagggatgccgatcactggaagtattcattgggcaaggatgctagcacagcaatagttcccaggccacccagcagagcgctgatgacagccgtggtggcgtggcttgccaaggactttgaggttgagtggttagacttgattcgctttgccggacgctcattctcagcaaatgcagagacattctcagcaagtgcggagctgatcgcatccttggcttcagaggaaattgtgttgaggtcgagatccgactggctggttggctctacaggcaatcgctgagcatcttgagaaatactggcttcaagagccgatgattccatctctgttgcagtacgcttcaaatgtggttttctaaatgttgccaggcaggcatcttccgcgggatagccggtcgagaatggtccatcgtgatagggatgtttgaattcatgggacaaggacggtaccccaacaaagctctcgatcttccgttgcattggtgggtatttgttctgacatgaacttggcagctcaccggaaacagtgtgtgtcgggaaccgagcacctgggtttgtcataccaggagcagcttgtcccatcaatggtttgctctcgatacgtgcggggttcagtgactggccctcaaacggctttgcagatacatgctcgggcacttcgacagcatcagtgttgttggcacgttcaagtttcttcacaagctccggaccaagcaaggaacggatatcaggattttgtggaatatggtgttcaaggcacccattgtcagagcaatcagagtcgttttcggattcatcacagatctcgccatcttcttcaaagtcctcggcataatcttcctcaaagtcttcttcctcgaggtcgtccgacatttcacagccgtctccgtgaatcgagtcgctgtcgtacatgagacatggatatctggggtagctctccgaggaatcactaagagcatccgacttagttgtgtattcctcgtattcttgagcttcttcgtctgaatcaaccgactggtcatcagagagccagttttcatcgaaattcggatcccagtaaggagccacatcgcaccatcgatctccgatcattcggggctcccaggccctcacgatccagcacttgtgacagtcttcaacctcggtctcagtctccagctcgcgcttcaggtcttcgctgagaagctccagtggcttttcaacgatccaccaccgattgctcacccgctcgccgccttcatcttcgttgatgacccaatatcttcgcttatcgactgaccagtaccgaagaaggttgccgggcatacgatggaacgatgtgtctgagtcctcggagtcaggctcccagtagacttctgtcccaacgcaaggtcggaagctaggggtatcatctacccagtacgaatcttgggaaatagaacaacggcgcgccgcgtgaatgatgtgcctgtcgtggtcaacgtccggtatgttgttggattcaccccaagccatgtctgccaggcgcatgaacataggtcgcatcatggtccaatcgctgtaacgaatttcaggtacttgctggtaacagattgcagggaggctatcttcatgtgcttgttgttcagatgcaatttcagcagaggccgactcagcgagatatatcttggcatctgagaccagtttggcgggagatgggttggtgtcggagaccggtttggtatcagacagttggccaagaagacccgggaccagtggggtagggtcgggcacaatcttggagataggctccttggtagcaaacacagttccccaaaaggagttgcacccgtcctttgaatgttcgtcgctctggacactctggacactcgaggcaggagaaactagagatgtattcataggctgcagaacagtagtttcccaagatcgagcaacggactccttagaagagtcatcactgggtaggtcggtgtcctccatatcgctatcgtcttcggggacagagaaactgttggttgacggacttggatccggtttgatagaaatactatcgtctggaatgaccacatgctggggtttgagccactcaaccttgcagctgacttcgatgggctcaaaaacttctgtactcgattagttccagtgctattagacttagattgctaacttgccttggccacggtcaacatcgacaccgaatcggatgatgtctccgttgcgcagcggggtattcacgtctgtcaccagctttccaccattcaggaaagtcccgtgtgttgagccacagtcggtgatgaaaaccatctacaagggaggtcagcggggtgatctggtcagaattgggggatcaacacaacattttggtttggtagtatcttaagcaaagcatggtcacgagacatgacctgagactcaaaccaagcgttctctgctgtaggattgcggtttcgattttcacgctttgaggcacgcccgataggcacggtcttatcattgtcggtgatggtaagggtacgcagagggtagaggtcttcgaagagggggacaagcgtcacggtggctgtgaattagacatgtcagttgcaagtaaggtggcaattagggcatccaagtacttaccgcttgggtccgacatggtgaaagatagatgaacgatggtaggatttgaaaggcaggaataggatgctgtttgtttctagataatggttagactgagagatagaattccatatatgataagagcgaccatgacagcaaggtagagtgagtcacagagtatcggaagatgaaggggggtgcagaaggttaagggagttggagacaaaggcagcttacccgggtggttccaggctgcaacacgatcacatggaccagttgagacagccaggagatatcaggtgtattgcagaaaagtagattgcaagtagagcgactaggagcagcgaatataaagagttgttcaaagcacagaaggtgaggaaggataagggaaggaagaggggtaggttcgtgaatcaggtagtagttaggttcaccgctgacaacgcggacaacgcgggccttgaggagtagcgactccctttggaatgggactcaacttggttctcagttactggtaagtctattcaaattcgaagaaagtcaggattcaacacgaaactaagaagtaaggtatccggaagctcaggaacaatgaggtatgtatgagaagtgatagtataagataagcgaatgacgccgttggacttatttcgatgcctcggctcgacaacacttccctattggacacagactggctaactaaagaaagtatatctcaacctacgtactgagacttttcgctatttagttacttcctttttcgttgagacacagaagaacaacagagtccggagatgccgataaggggtggggtcagctgatgtggagacacacgtcatggtcatccgcacactagggggaactatgtatacgatgcaaaccatgtaaggaggatttcagagtcagtgagagcttttgaagtgtattgtaggtctgatgttaatgagcactatcattttcctctatggtacacaaattactacatggtcagaccccaatgcacttccccgggctcggtctgccgtccatcggcctatctcatcccgagtcttatctcagacagaccaagtatcaaaacaaaaagaaacgaaagaaggcggacggggaatatgtcaaccggtagtaaatacatgcggggagaatagtgaaccggggatccaaagaaaaaggcttagacaggaatacccaaaccggggcaaagaaagacgcgaagaaacgaagagtgaggagggtccgctgacttgcttacattccaggagcaccaccgttcacggcacccatggagttcaggcgggcagcgagctgggggtacttctcctgaacctccaactgggtgcgggtggcctcagcgtaggagatggcgttgatgatctcggcctcggtgcgagccagctcagcagcgcgctcgaagtacttgagagcctgggagaccttaccctgctggaggagaagctgggccatggttccgacagcaatgtcgcactcgggatcaatgatgagagccttctggcagaggttctcggcctcctggaagtcgtgcttccactggaacaaagcaagagccttgttgatcaggggcaggacgttgatacccatgggcttgctctgcgtctccatctcaacagccttgtcaaacttctcaatggcctcggagtagttctgctggtcaagcagaagctcgccgtagtagttgtatacatcagggacttcctcgaagttctttactgtgcggcggaaagtggccatcgccgaggcgacggagcccatcttgtattgtgtgacaccgagctggatgtgagagtaaatgaacgaacggtcgaggtcgatcgacttctggtagtccttggcggcttcggcgagctcggtcaggatgaagtgtagctgggcacggtggtagtagatatcggggtcgtccttgttgtgagtaatggcaagctcaaagtcatcggccgcagcgtccttgttaccaagctccaggtgcaagctggcgcgcttgatgtagctctggaccaaggaaggtgacagctcgacactcttgtccaggtcggccaaagcgccggtggcgttaccgccgaggtaggtgaaggtggcgcgcatgttcagagccaatccttcaaattcgtcgagctcgccgagctcaagtgccttctcgaaagcggcggcagcctcttcgtagccatcggcagtcttcttgcccatagcgacaagacccttgcgcagctggcccttaccggactcctcgctcaactcaatcgactcatccaatccctcgggcaagggctggggacggaagctctggaggtagttggagacaaaagtagcactaggcaacttcttagtgcgcgcctccagaatggcctggctcttcttctcggcaaccttcttcagcaagcgttcaagcgagttgcggctcacgtcgttggagaaggcatcaatgatacagctggctgtgaagtcgaggagagcctcactgtacttttcaaggtgctcatacgcaatggctcttcggttgagggccttaatgtattcgctgtccatggcgagagcggcgctggtgtcctcgacgaccttctcccagttggactggacattgtagcatgcggcgcggttggagtagaagacggggtcgggcttgcagataatagccttgccgtacaattcaatcgcgctggggtaatccttgattccgtaggccttgttaccggcagccttgagcttggccgcatacgcgttccgggtcttgacttgtcagagaaagtgtgggaaagaatatggcttaacatacctcttcagacagctctccaatagtggcctcatcgacttcgggaagctcctcgacaggctcctctgcctttttgacagactctggaatctggtcagtcatacgaccaccgtgtttgaacaagaacacctaccatcctgcacggatgcagccttttgctcctccgcctttttcttttcctttcgtcgctgatttttgctcttcttgggtgctgagggagtgggtttgcggggatcgttcaggtaatagacaacacccgctccggtcacgacaacggcaacaccggcaatggtgtaaacaacggccttgttctctgagacccagctggtgatgcgatcccagactgatgccgatgatgactcagtcagctttgatgtatcgagcaccacattttgggcgggcgtaggtagcggcagttcgttcgacatgatgtgcaaagcaaagggaccgacgcgactagttctaaatgtgggcagatgtcagtactcaatccaatgtttggcgcaattagactgagatggaagacaaaggggtcacttaccagacctcgacagtaggagttagagatggggaagttcgggaatgatgaagctcagaggaaaagtcaagggttccgctgaccgggtcggccaatcacgcgcactgcgccggtaacactccacaaaacatatccggattaaacagagtcggctcatcaggtttcttatctcttatactcttccctttttgtccttcgaattgcatccgaagtaacatctgtgaattcatttcctatttggcaacactgacctggcgaccacagtaacgacgttacgccattgactgtcgcaaaaatgaccgagaactcctcaagcccagaatcattcgagatcttttcttcccttcgctttgacccaagccttccagacgcagcctgtcgccatgcatcgagctatcccgatcctcaaaaatccccctactacctcctcgcctatcaccaagaccggctcacagccgcagcggctcatttccaatgggacgaggctctaaactggctgcagcaagacctgcaagacttcgaggcgtttctcgacgcgtcaatttcggacctaagcaaggcgtggagactccgaattgtagtgaacagtaaggggaaggcgagagttgagacgaacccaacagcgagcattgatctaatgagtttgttcattccctctctacatacccacccaagcgaaccaatatggcacgtccatgtcgatacgcaatcaacaactccttcaggtttcaccacacataaaaccaccgcgcgggatgactacacgtctgcgcgccagagggcgggaattaattccccgacagaccttgccgaagtactggttgtgaacccggatggcgaggttatggaaggcagcatcactacgccgtacttcttgcgggaccatatgtggatcacgcctccgctcagcagtgggggcaatgcaggtacaacacggaggtatgcgttatctcagggtttctgtttagaacacaccatttcccgagatgagcttgtggatggagaggagtgttggttgagcaacggcgtaagggggttcatccgaggggtcatagtcaaataagaatttcccatacttagtatatcttcgataggtatactccgtatatgtggacgagtcgatacttgaatggtattgataaattgatcaaaaggctatgaaatcatccgtatttttgaacatgattgctccagaaaatgctccatcacaggtctatttcttagccttctcaatcaccactgggttgggattccccttccactccaagggacgaggacgcatgtactcggccataatctcgtccgtaacctgtgctctgcgctcctggaacccttgaacatacttctgaagctcagcgatacacttctgcttgatctcgccggtcatcatcttgccaccctcgtaatcggcacggatgcgctccagctcctcgtcgtcctcgaggaagaatgtcaagtactggaatgggatatcgtttttggtgttgccgcccagctcgcgctgcaactccgcggtgtcctgaccacctgagaaagcgtgcttgttgatcttgttcttgatcttgttaggcgtgtcgctcatgaaaatggcggaactgtcgacactggcggacatcttagatccaggtccctgaagggcgggaaggaagatagagtgaatgagagagggcttcttgtacttcatcttctctgcgtgttcgcgacattggcggaagtaggggtcctggtcaatggcgcatggaatcaaacaaggaatcgatgccaccttcttcgtctcggtgccgaagatgtgggggaaactggtagagaaggcggcggcggactgggtggcacagaagtggaactcgccaatgttgttgctgtcgttaaacccaaatgtgcccttgacctggttgattgtaattctcttggccatgcggcacatgttctcgtagaaagcaccaccaataaattcgaaatcactgaagataaaggtctttttcatatcgaatccaacagcaatgatatccttggcgtttgcttttgtgtatctcttggagtcctcaatctcgatcttctgggagtgcataaacttctcgtcgtcggtcatcatgataacgaggggaacatcgaagacgtcctggagccatctacatttggattagttctagtaatgtcccggtgatcgagactaaacatacttggtgaactcgaacggcacagtgtgtccgacgtgcatgctatcactactcggcccacggccagtgtagaggaagaatggctcgcccttctcatgcttatccaaaatcttcgacagatcacggtgactgaacacaatactccggcgcatgaaacggtgtggccggtggccagtcactttctcgaagcgctccaatagagctgcattgatgggtgtggctccaaactccctcgtgagcttctcgtaatcgaccggcaacagcttgccggattcatcgaccccaccggagacatcgaagggcgtaacgatctggccaacggccttggtctctggggttttctcgtcgatgctcaaggagttgagcgccggaggctggattgcttcgttggccatagttacttcttcgtctggtacaaattgtcagttccaggtgttcaattgtatcagtcaaaggccggttctcactttattttcggttgagagaatcgtgaatttcttctgcccctctccaatatcgcgggatgagtcaggattcccgctatcagtgggcactctgattggtcgatttgatacattatcaggtgaccagtcctagccccgcgaaagcctttctttgtgattgttattgtgtttgttattgctgtcttgataaattgattttgagttgataaaagtgtgagactctctattacattaggtcggcatctctgttgtctttgcattgcattcaaagtttatatctggaaacagagtgcatcaagaccgatccggcggaagtatatactaagacactcactcctccaaggccactagtacttctttttataaactgcagaaaaaatagattaaaccaaatttaactcatccctatgtccatagtatagacgcttctcaggccccccacgatagtaacgagttgaagaaattcggcttctacctactaatgtaggaaaggtggccataggacgtaaaggtcgcattatcctatccaaaaagccagcgaaggagttctcaacagcattagcaataaaggctaaattatacgaggcaggttctcataaacgcctgcctgtaccaggtaaccttaactcaagtactatagggatttagactaactactcaaactcccagagaatagttagtcacattttatcgtggaccttctaacttagtattaagacacaccagattcccaagacaattaatgaacagcccgaagacatcttgatgacgtccatcttccagcgccgatcatatgtcttaagatcaacattccttcccacaagttagtaagagacacattccacagagaaacaccggccatcacttgacgaacatcggaatgcagtttttactttggaacagcacaggatccagacttggcagccccctgcctatcatgcaccgatctagaatccctgcccaaagctattgtagtctatatgctttcatgacatgtatctcgcgtataatgtatgtgttggctacaacagcgaatatatagctcgtctttttctcgcatgcagtgcggacattgtatttatggctgtttcgatagacgcggaagacgagcctggatgtataatatgtagtgcagtttcgtattgaagctgaggcttctactattcctctagctatggctggtatcgatggcatgtgtcaattctatattcaaagaaacaatcataaataatgtcggagatacgtatggctggttccttaaacacaaccactcgatcatatttgtctatatactcggaatcgtcttctgctttaggaaatcaactatcatcaaatgaagcggatgccacccaaatcccccacctacacttctacctatgcccaagatggggcaaatgttggatccacatgcgctagcgtggctaggcactttatgagatcccactgttgtgggatctatctcagaacggtatccatcttcgaaaaaaaaaaaccgacggtctagagccaacgtcattcaaggatcacgatgatttctctcccgtgaaatgagacactctactaggacaccccggcttctcgcataccgtcagcccaacagtctcagtcaaagtgatagagatgcgctgtactctactccgtactcagtataccagcccactttcctagctcccaataagcacctactccatcccaccaaccactacccaccttgccccgtggatgcgcggggttaccacccctcgacccgagactccatgcagcaagccgccgctaagaacgccttattcgacgggcctgcaagccactactccgtatatccgacccccttacgccggactatcgagtatatctccaaatgcgtaaaccgacggaccacaccccgtatgattggtgacatccgtcggttaatagcctaggataacgaagtagactttggcgggtgtgtcactcatgtttgagattctgccggtaagcttgtgttttcggtctgctgcagatgttggtggcttttttgataatcgcacgttattgatggttttggttgagggagaaggactgggatttgatatcggctttttggaactgtgggaactccgaaggggtccggttgacacgtagcttttgtcgtgttctgtgggaagggatccccgcttgctttgttggctgtatatattttgtgatattttgctcagtctcggcgttctttgttttatgctggggttggtttcactgcgtcggattattcccgtggtgggggtgaagtgccgaggctatggtcttataaattgtttttggactggacttggattttaattttgactatgggctcctcgatactctgttgtaggtttcaaactcctcttgtagtacagagtacagcaggaaggtgcaagagtatgcaggggcaaagggcaccactgccgaaacttactgcaacctcgatttacgttctagtaggaatggtagaaatacttactattatctatatattattcgccactgcgattttcagggactctcagtgggtgaggtgaagaagatcagctctagatttgcacctgggcaaaatacgcgatagtatgaaaccaaagccagcccagtatgcagctagctcaatcgggactaatgtgtaggttgcctttgcttttgtacctttattattagctcatatttgactctaacgggtcatcgtatcgtttagatgttactttgtctaggggatgatggtccaacacgaagataagacaaatacctcatttgaatataagatttaacctttctaaataaaggtctgcaattatacagcttttaaccaaatgcgccactgctcaagagatagctggatggttggaggcttggacgggaatgcaagacatgctcacaccgcaggccatcatgagattgtatcaagcacctagaacaagttcaagggagattcagcctattgcgccagccagtcagcgtcaacggtttcctccctacacgcgtaatgataggtgtcgggtgatgcggcggagcaaggcaacacggatggtggttggctggatagaatctcctatccagctcagggatagattagcttcagcagaggaagtagacggatgacatgactgggtaaatcactgtttagttgggagttagtcgggacgtcactgtgttgagttaggagcgtgcgaatcagaaatgaccaacttgacgcatgacaccccggtcaatcaccgactggacggggatcttgatcttttttgtttgttttgggcgtccattcccgctatatctaaacttgattatctccatttgtgatatgaagaagtgaattttttgtcttttttgaagtctagcccttgggaagagctgggtcaccgggcggctgcgcgtggagagcgatgtactcggtaccttgtgagatattggtttcacaggtgcctggcctgaagcttttaagaaggacgattcctagttcctgtctcctttctctctcactcgtcttgaagagattgaacatattagggcaaaggagttccctgcagtcccactattaaaagcggcaccttcgtcatcccgtccccccaatcttccaagaagaaaaagaaaagtctggatgtgagggcatcggagtcctcggactcgtctaagtacgcgatttctatttttttggtctcgtttcattggatttcccagtttgtgcctccttttctgtattttgtcgtcattggcaatttcttttgttctattcttgactctttggtggagtttccccccgcaagtgcttcatgcacactaaccgggaaaaaacaattagatgcaacattctccctcggattccccttttacgttttccttctcttcttcttcttcttcttcttcttccatctacctctcgtctcgtaatagttcatttacaccaagtaagtggctcaattccaggcttttgtctttttcctagcctatacctcgggttcgatatttcttctatgactcgtaaaacatattctgtcggctatcgcgatacgccttgcattcttcgctcaacacatgtggcattctcatactaacccaaatctccaggcctatcatcggcctcgtatcgacgctccgcattccaaccaagagatcatcttgaaagtctgatcacgaaacacggctaccccacacctgtgtcactctcctctctgcgagatctgacggccacttcgtctacttatactcccccttcgcctcggcccagttacccggatcccagtccgatcgacacttttgactcatttactttatcatccacacgacccattcctatcccaagacgccccggtccattatacgaggatcttccagtgacaccactcacgggtcgattcgatcacgaatcttattttgacgattgggaacgtgcgtctcagtccgccaagtcccgacaaatacttccaatccggcctgtccgtcggtatccatcgcggccgctgccatcctcagcaataatgcgtgctgataactcaccttactactcccctgctgcctcacctatcatgtccccacggcgctcaaactctccgcagccaactcgctgtcgtgcccagaacccttccaaagtgaagcaaacccagaacttccacctcggcagcctgccccggttccatcctgccgtatatcagtcgagcagcacttctcacaacgctacagcgcagcctccatctcctcaccagtctcggcagtccacctaccgcactgcagccgggtcacgcgacatgatgtggcagtaccgtgaatacatcgagggcgtccaccaaggtccttcggcgccccgtttggatcctctggttagtccgggtcccgtcacgcccctggcgctagaggcgggtgattatctcgcccatggctccatgaacaacacatccgagcggatcccgcgagatgtcccgaagaactccggccctccggctgagctggtggagaagctcattgcctatgaggagatggcccgacagatggcgcgaaagtccgccaagggccgatagtagactgtcccaccctggctctgcatcaaaatgtttttgtttattatccattagagaaatgggaaccccccgaggttcttcctgcctgttcattttatatctgttttattggtattcgggaacaaatgagctcactccaggctgatacagtgtgcatgggtcttttggttttcatctcttttttcatctcctttttgttatctcgtcattcttacccctcatggtcaaacttcctcggcgtcggccgactactgtgtttgatcttgcatcacggcatcatgtatctaaattataccccgctctagtccagtctcggaccttggcacatccaagtttcaaccttcaatatcaaacatattattcatcctcctttgtttgaccacaccaccgtggcagctaccaacctggcgccgtaacgtgtccttccaaaattaattgttacggtcgtaagccaagtcccctgaggcgtagtggacatgctagtttgacacttggaggtgtctgttagatcatatccgcttcacttgcagcccgccagggcagccgtgtagcccatctggagtgcctttctaatctccagtaatctctagtaatctagacaatgaatttttatcatgcctttttttttgatcttgtacgactttcacccggcttcccaccaagtcgcttcgagatcagcagtcccgataacccaaatcttacagggatgatatgcagaccttcaaagctaatccccagatttactactcccattagggctagctcaaactgtagctcgaaatctccaattcacgcctaaggcatcacccgcgattcggaggaacactcactctccccgagaggagtctgcggggcccaagcgattatcataccgactcccctcgttaatattttcctcaattacctcattgcagttcatatatataccccagcttccccagacaagacgcgccggcttgcaaaaaccctccttggcagctcagcaaccccaaaccactctatccttatcagcatcgtcatcacatttccaaggttcgcttttaccgcccacgcgttgcgcacgagcaccccacgagtccagcaggcgtcatttccgtgacgcattggatcgccagatccaggatcggagattggggaaattgggatcgagattcgattcttggacgatgtcatcgacgccggcgcctttacctgtttcggagatgacgagccaacagaaggagaacgcgcttgctcagtctgggacatcgaagtcgaattacaagggctttgtggcgggtgttttttcgggaattgcgaagcttagtggtaggttcaagtgttctgtggtttgagttggggttgaagctaatttttgtttttttagttggccatccgtatgcagaactgaactaaccccttcgccttgggtcaattgttaacgaaatcgcacagattcgataccgtcaaggttcgcctgcaaactagcaaagatgtgcagttcaagggaccgttggattgcacgttgcagactttgcgaaaggaagggttacaagggttttacaagggagctacgccgccgctggtcggatggatgatgatggactctatgtgggtgttccgcggtatcaagaggaataataggaataatgctgactgtctgcagcatgctgggctccttgactctgtatcgccgattactactcgagaatgtcttctcgaaacctcacctccgctcttacctccccttctcgcgctaccagccagacctcgcaactctccctagcttcggacatggcattgcaggtatcatggccggtacaacggtcagcttcatcgcagcccccgtcgagcacatcaaggcacgtctgcaagtgcaatacgccgccgacaaatcgcagcgcatgtacagcgggccgatcgactgcctgcgcaagatggtgagtgccaatgactacattacatatacacccaccgactaacatggacaggttcgcacgcacggcatccgcggcctctaccgcggcctctgggcgacaatcttcttccgctcgtttttcttcttctggtggggctcctatgacgtcctgactcgctacttcaaagagaacaccaagttgtccgcccctgcggtcaatttctgggccggtggtatctccgctcaatgcttctggctcacttcttacccgtccgatgtcgtgaagcagcgaatcatgaccgatcccatgggtggtgcgctgaatgacggcaagcgacagttccgcggctggaaggacgctgcgatcgccgtatggcgcgagcgtgggtggagagggtactggcggggcttcgtgccatgcttccttagggcgttcccggcgaatgctatggctctggttgcgttcgaagccgtgatgcggaccttgccctaactccttcacggtctacggagaacacgaacccaaaatgattacatatagaactttcatggctagataataaattagatgaacatacccgttgtttatgcatgatttgtctccgatgaagttaatctcggcttggggtagtccgcgatcaggaatgtgtgctctgtagcgatgagccgcattcggcgatgagactcttcggggccctccttgaagcatcccgagatagcacggagatactccagggtctaagcgaatcccaattcgtaattgggccatgcagctgggattgtgagctcggccgccgaagggtcctcgatagtgaggtgacatgggttgtcttggtgctgtctcgttccggacaaggcaaagaataaaacttatacattatccatagctgttctctttaaaacttacactctctttcacgtcaacattatttcccgtagtcgtcagcaggggaggaattgaggcaaattgaatctggttccttagtgcctgaggcagtcccgcagtccacgtcaacggtttcaccagacagcgacaacgcctcaaatctccaatttaacgaattaacgctgatcggccatggccgttgcacgctccatgcgccgcacgagcccaatcggcctcgtgctagcagcgctgctagcatttggcttcatatgcttcatgctctcgccctcaactccctccgcaacctccgcatccgccagctcccaacagcgccaggaaaacgccgccgaacaccccctctccccgccgaccaaacccttcttcaaatctcaagccgtccgcagcgatggcttcaaggccgccccgccggtcgtgcactacgacctcaacagcctaaccagcaccgcggactccatcgccaacggcgagcggatcctcatcctcaccccgctagcccgcttttaccaaggctactgggacaacctcgagaagctgagctacccgcacgagctgatctcgctgggcttcatcgcgccgaagacaagcgacggcaacgccgcagtcgcggctctggaaaaagcaattgccaagacgcagtcggggccaatcgacaaccgcttcgcaagcatcagcatcctgcgccaagacttcgacccgccgttgaaatcccaggacgagaaggcccgccatgcaatggccgcgcagaaggagcgccgcgagtccatgagtcgcgcgaggaacagtctcgtcttcacgacgctcggccctgcgacctcgtgggtgctttggttagacagtgacgtcgtcgagacgccgaataccctcattcaggatctgacggcgttcaatcagcccgttatcgtgccgaattgcttccagcgctactacgattccacgaagaagagttgggatgtcaggccttatgacttcaattcttgggttgatagccagattgcgcagaacctcgctgcgaatatggggcccgatgagatcctcttggagggctacgcggagatgccgacgtatcgtaccctgatggcgtacttgccagatatgaaaaatctggatccgaagaggatgcttgctcttgacggtgtgggcggtacggccctgatggtcaaggctgacgtgcatcgtgacggggccatgttccctgccttcccgttcttccatcttgtagagacggagggcttcgcgaagatggctcgaagactgggatatgaggtcattggactcccggattacttcgtatgtttcgtctaatctgcatttgcagagatggggacaatcttgctaacatgctttttctttttttttgcaggtctaccattataacgagtaaatggttgacagcctcgtttaacgtctatttcacttgcatacactgcgctgtgcgcgtctcgacgcctttctcgtctctctgggccattcgagagattcattagcaacattcagctccgtgtccgtctctctgttgagggggtttatttcatacgtgcttgggatggttgtttccccaggtctcaaaattgactttgcattattctgtgtattaccaaggaatatgagtgggtatctatttatgttggagaggagttagctccaaggaccaagggcgttgctggcttgatgattcttgtgcatttattttggctctaacatggctatctccatgttcaatgaacgttacttattcgtgcaagattgaatttaaatgaatcatattagagacataaaaagcaccatagtatctagtagcaaggcgttggtctatttataactcgtcacttatgtatccttttcaacgagccagaggtatgaacttttgtcgtgccaaggctaacagtgctgggcacagtatgatattaccggtgtataccagcatataccaatgtccgatacaacaatcaatcccaagaaatactataaagcgtgtcagtgatattgtgcctggaaagcatggcggggcgaatggatacttacgcaagcataataccggctccaagagcaacagccaagaactgcgtgatagtcttccgcacctcaacgcccttatccttgccagtctccagcaactccggaatcacagccacggtgccaacatacaagaatgtgcccgccgtgaacggaagaagcatatcaccccaagtaaggctagttcccagaagaccagcagacttgctatcatccaacatagtgccattgccaccgaattcctggacagcgattccaataaaagtgcccaagaacgcaccaatagcggtcacgaattgcgcgcccatggccttgcgcttcgagaagccagactgaatcagcagagcaaagtcaccgacttcatgggggatttcgtggaagaagacagccacagtggtcgtcgcgccgatagtaggtgaggcatagaaagaagaggaaagagcaaggccatcagtgatgttatgggtgaagtcagcgatgagattcaggtaaccgccaagcttgacgctggggttgatttctttctcgggaacgacctcagcggactccttggcagcagacttgcgcttcttcagctcgccgctggtcttcttgctgtcagctccggatgtaactgcatcgactggttctgtgtgcgcgtggctgtgcgagtggtcatgaccgccctcgccgccagtggcgatgcgcagggttttgtccattgccacgaaggtgaagaatccgaccatgattcccagacccagaaggaggttcttgtttggctcgaccattacgaagctcacgtggtcgggggaggcttcgccgacaaagatctcggggagtaggtggaagagggtgtcgccaagtaagccgccgacggcaaatgcaaccatcactgacagagaggaggggtcgatgttgggtgggcatagtgccaggaggaagtctagagcagttagcagaggcatatcacgagtaccgagggaatacttactaggtgggccggagatatacaaagttgccagaagcgcgttcacggctggggtgctcgggaagaggacagcaaagatcttcgctgtcaagctagtggactctggacgagttgcacgcttgtgctcattgagagactcgactagtgggcagctctgtggcaggtcagtttacatgtaggacacacagtacttgtacagcatacctgcaattgctcctcgatctgacccacggagagccctccgggaccaacattagctgcagctaaggctgagaacaaaaagcatcctgcaagaagggcaatgcctgtcctgcgtgatggaaaaaagcgagaagccattgcgaatgaattggccagggtgctgtaaagtgacaagcaatactccgtatacccacggaagtagaatccccgtggacagctgagccgctatcgttgtttatcgcgggacactgagcaaacatgccaagccttgcaaactcggaaaaaaagtttcgataacgcttttttattatcgccgactccagcgaagaagaaccaattcgacctccacactcacttcacaattcacaatgggtaaacttttgcagaagaagaaggcccgctccgggcgctccatggcccgggccaaggacagccgtctcaagagcggccacaagaagatcaatgtgctgggaaatcagatcatcgccgacaactggtatgcacattttgctcaacttgaaaaatacaaaagctaacaactgtagggatcgtggtctgaccctgacacaaaattaccagcgccttggtttgatgcacaagctgaacgcaccatctggtggccgcgaacgccttcccggaaacgaggaccaataccccgagaacaagaactcgctgcacatccgcggcagcgccaaagcagccgcagccaagctcgacctcggcgagacacgagtcgagcgcgatcccgagaccggcaagattctgcgtgtcatccacgacgacgaagacaacatccaagtggcgggcctcctgcgctcgcgcaacaaccctctcaacgaccctctgaacgacatattgggaagcaagggcgagagcaatcctctcgcagactcggtgattgtgcaacaactcgagcgccaggccgatcaggagggcaagactgtccgtgctaagaagccgcggtaccaaagctcgcgcgagggcgagtgggctcagcgcttgattgagaagcacggggataattacactgctatgactcgtgaccgcaaactgaaccctatgcagcagagcgagggtgatttgcggaggagacttaacaagtggaagaagagtcagtcgtaatgccttcatttgttcagagcatctggttagggcgagtctggcgtttatatttttttgtttatcaaaagtgtctacgtggatgcaatgcgtcccgaagtaaatattattggacggcgactgagccgcttggattcgttatactgttcctttagttgttactgctgagcgtcgagtaggtgacacccccggccggcgggaggcttattcgttgcaccactcgtacccatcgtcggcgtctccattctcccactccgtaggatgcagtcccttcctcccaatcccgttgcgtcttctcctgctccttgcccttggtttccttgggagatggtgggtcatgtaggtctccgtaggctgacgtcaaatcgtcccctggttcttgccgaggcgggggcaagtcccaaacccaaccaccgacttctccgacaatggcattgccttccgcattcacgcctgggacctcgaatccaacactagtgatcatgcgctccaagacccattcacggcagtctaggtcgagttcccacttcttgctcttccaagcccagccacgcggggcacggacatcctcaaagaatcggcatccacgagggcggtccccggcaatgcgagatggtgatagcgggtcgtatggcgcgtggctgaagaggaagctctcccacccagactctgacgttcctgcggcccggtgctgcagctcaaaaatttccacctcccgctcctcgggatatgtgtccaaggagatatctgcgagtttttccatagccgacatcactgcggatgggtttgtagagaccgatgagccgaacccatcattcttgtccgattctttgtctgaggaatttccattcatatcttgcatcaaactccagaggaagtgtcccaccgttgggtggatggaaagaaccagtgcattgccgcaaagaagcagcacaagcttaaggggcagcagatgcgcactgatgaacaatactactatagcaattgtgcatccgagaaatagagttgaagagagcttctcgttggagaaattcgtcagcggcgcaaagacagagagggcagcatcgtgggcgtctgagaaatcagccatgcaattctgtagatcccgcatgttccgaaggaagtctttggaagtctctggtgctggcttaatagtcgtggctggtgccagcgctggcccatcataggagtagtaaggagtagtgatggacgtcgaggtgcttggaggtggtggatgacgagtcgcaaaggacggcaccattataaacagtaagataatcactagaggcaaaacgaaaaggagatggggttctaagcagaggaaagagtagacaaaaaggaaggagattgtatgacttggtgtgtcccaggtgaatagttgctcaacacggctctggaacagaaataccacaccgattctatagtagttttagcctcggtaggatatcacatgggacgattcgattctaccttgcattgaaacggcggaaattgtttgccattacaggcaaactaaaagccggtttctgaggagaggcaaagaccttgtctcccgctgaatcattttcatcctcatcgtccgttgggatgacttgttggagaagcctgcgatcgtcagctggaacacggatctatcggatttacccaggagcaaacccattccaaacatactttgtaaataggcggtcttgcagtgagttcttggatagagaggaagacctcgaatgcgagctatctggcgaacccggtctattccgttttgtgggcttgggcatgtcgctcagtgcttctgtaaatccatccatgactagacatgggattctacaggaagaagagaggaggtgaaaagggaagagaagtagttagtcctccgtactccgtagagagtcggcaattatacgatcagccccaagcacatgctttgccgggaaagaggctgacataatcccgtgtgtatcaggggaacctcgaggtacgatagttcacgaagaagaacaagttggtctcattgattctttcttgtacttgattttttttcagatatacatgtgttttatatgtgattcttcacatcccacttcgatttcatccaaaattctctttgtggaccaggtgccctataaaatccaccttcccccccaactttttccctctagttaccgccctagtggacttgccccagcaaccctgcttccccccaaaattatttatcaaagagaacctcctggcccttattgctctttcacaactcgcaatggaacggtaactgttttcaagagtcgcgcgacggtgctcaagtatctcctggttgagacctcgcacttctcctgaatgcaattgcgatcgcctctctggcacggtccagtctccttttccgactttacttgagagacgcgggagcttaaacaatgccaacaaagccgcaaacactggggaggggtcaagtacggaccgaagcacaatcacacaatccctcacatgatgattcgggctccggaggtaagagttgagatgtcgggaaggtgcagctagatactaacaagaaatagcagaggctccggcccgcaggctcctgcagaagtcggcttccacgcacttcccctcgaatacccattttgacacatcgaatggggtcgctggtccgcgcacgggtgggataaataggagaagactgtcaattcgtgatagggttcctcagggcccacggccacaagatagttcccgatggaggtatgtctagttctgctctcgtaattgactcctgaactaatttgatatctagcaaacctagtccataccttcattctaatacctcgtctgtcgattcgacgatggattcgaccaaaagcttcaaccttcgatctacgagcgtgggcaacctggcaaaggctgattccaatcatgcagacaacatggacttactagcgccggtcaactttgatgatttccataacagcatcatgggtgagcctagcctgaacaactttcccatgcccgcgagcagttcgggtgagaatcgtgaaacaggtcctccggcaaacccctgggaaagccacacgtacgcggccaacgtatcggaacgtgcacggggtgcttccgctcgacgaaagagtgaggtgcaacgtccgaatggtccgaatgctgcggcagggctcacggcgtcctcggccaacacccgcgcccgccgccagagtatagcccagccgtctgccggagctgctccaaggggtccgcgcaaatctatcagctctggggcatttgcgcctaccaatgcttcggccagacgcgccagcctaagtgcccgcaaaatcagtaccgataccgcggcggcaaataatcaccttcgccctcgacttccagagtctgatgctagagctgctcgaaacctcaaggcaaagtcattccagcccggcccaagggaacctcgtggtccgtttctcactccctctgggaacattgaccacacacgatcaaattccaccaatgctgtgcggagcccggtaagaaactcttctgccgccgtagcgactccttcctctgcctctaagcgggcttctgttatgccgccacatgccactggacttggtgctcgaacgatcagtcccactgacgcacgacgattgaagcgaatgtcgattgcgcctcctgctcctccaatgccaaatacgcctcccacccagacagaacctcttcccatctgccctatatcatccactcaatctccctctcaaattccgaggaaaagcgtcacaccttcctcgaaccgaaccacgcctgacccaaatcgaaagtcgtacagttcggggctgtctgcttcttcaagcaccagctataactcagtgcgaccttctgcgggctctcttcaaaaccggctgtcccaaaatctatcttcctctcgacttccgactcccaagccacgcacagaaggaaatcccaacggggaagaggtaccaccggttccagcgatccctaaggcctacgagtcgcccaaaagtgaaatggatgcacctgtcttccccacgcctaggaaatcaagtattcctgtggatttgaacattttgaaagattcagactccgaagtgcattccatagcccaagtcgacaaggttgaccctgtagaagcgaaaacccctgattcacgaacacgaactactaatattgtgggaggacgaaagggtttgcagcccttgaaattgcccccgctgaacttattgcctctgggcacacccatggcagccaaaatcgaggcactcaaggacagggacgaggagcacagagctcacaccccctccaaacaagtgatttcaaagacgcccagtactccgatgacagcatccaaggcgaatttctggtaccgtgatgaagacgaccaactgcccctcactcaggcacgaagcagcacctctcactttgccgtcagctcaaccgcgtttcgagcttctagcagtaccagcgcgtttgagtcatttgacacgccaagcgcagctcggaacatttctccttatgcctcatacacgctgcctaagagcggtgctgagctcaaccatctccgccaacagatcagcgccgactactcgaatcgaacgcaagcacacaagttgaatggtccacgacctcaaactcaaactgccattatcactcctgccccggaacggctcagccagatatcgacaccttcggagcctgagagtgtaactgtcgctgcgtccagcacctctcttcgagaccggcttaaggtggcacggcttcgcagcaactcgaagccccacaagccagaattcgatgctgatccagccaagtacaatgctatgccgccgcccaaacttccagcctctgcaacatggagtaacctttcttctgtcaactcgacgagccctaatcccaagccatcatatctcactcttcgccgccagtcttctatctcaaataccacaaatgcgacgactcggaaaccaagtgtcagcagcgagaaaagtctcgccttggagccaactccttccaatgagtcggttgaaagcgaccgctctagacgtgtgcagagctcgtacatctctcctgttcataagatgatcaatcatgctagatctagtgttgccgctgccccccggtctaccgacagcactgttgatccagatgtgattattgcagatgaagagatgaagcgacttggggccaaacgcaaagactttgaaaaggcggcgcgggtgctagacgacttgcggcgcaaggctggaccaaaggatcgtgtcagtcccgcccaggccttgaagatggccgcgctcaacatctttgaacgcggtgagatcattgattatcgcgatatttacttctgcggtactcagaccgccaagaaacatgttggagatcttcactccagtgcagcgaacttcggttacgatgatgaccgtggtgattataacatcgtcgtcggcgaccatctggcttaccggtacgaagttgttgatgtcctgggtaaaggtagttttggccaggttgtgcgatgcgttgatcacaagactggagctctggttgcgattaaaatcatccgcaacaagaagcgattccaccaacaagccctgattgaggtcaacctcctacagaaactgaaggaatgggatcctcatgggaagcatagcgtggtcaacttcacccaaagcttctatttccgtggtcatctatgtatctcgaccgaactccttggcatgaatctttatgaattcatcaaggcccatgaattccggggcttctcgttgaagctgatccgtgttttcaccaaacagatgctgagcagtcttgtgctgttgcacgcgaagaaggtcattcactgtgacttgaagcctgaaaacatccttctcgttcacccattgaactctgaaattcgagtcatcgactttggttcgagttgctttgagaatgaaaaggtctatacttatatccaaagtcgcttctaccgttcgcccgaggtcatcctcggaatgtcgtatggcatgccgatagacatgtggagtttaggttgcattttggctgagctcttcactggctatcccattttcccaggcgagaatgagcaagaacagcttgcttgcatcatggaggtctttggtcctccggaaaagcatctcatcgagaagagctcacgcaagaagttgttctttgattccctcggcaagccgcgtttgacagtttcatccaaaggccgccgacgtcgtccaagttccaaggagctccgacaggccttgaaatgtgatgatgaagccttccttgacttcatcactcgctgcctccgctgggatcctgctcgtcgactctcgccccatgacgcattgaaacacgaattcctcactggtgtcaaggcgccccggcccaggatgtatgcatcaaactcgccccccaagcgaggtgtcacgtccgggcctcgtcctctcccagatcctccaggcacaactctgaagagcgggttcatgcgtacccgcgatgcttcggccaattccccggtcaagtctagcggcaagcgacactcgaccgtgaatggcattccgtccagccccggcaagcgagggtccagcaactctactgtcgggtccgcgctcccccgcgtttcggcgcggaatatcagcgggaagcccgacctcgctactgcggcggctgcgaccagcctggtgagttaggccagcaacctgaaccggggccagagatgggatgctgaccagccgctagaggaaatgatcttgcacgtttttttttctgaatgcgctgtaatactaatccttgtttttacgttctcatccttgcatcgggtggttgtcatgttagcattttgttccttgagatgcattcatgttatacccccttgttcctgcatttgcattgcgcctctgatgacctgagtgttcgcttataccttatgttttgctcttgcttatgcatttccttcgtttttgttatacttgatgaaccccattagggccatgtgtggtcccttgtacattgttacctcttattgcatttcttaagagtttatgtgttgctcatgggtagagcgatttaacgttgtcaagtggcgtctatgctgaattaatgaccatgtgatttttagttttacaacttctataaataagagactgaataataaagacacgttaaagacacgatatagaatgcacgttgttgtactggcattatccccactgggcaatcgggctacttggcctcatcgccttatcttagttactccacttctacaacaactttggcctttatgggtaattgattcgcaatgaatggcttcgaatctaagggcctggacgaagattccttcggcggcaagcctggtctgactgccctgaagaccttcgacgcctttcgtgagtaccctcgagattcaagctaaacaaaagctaaccgacctccaccagccaaaaccaaagcctcctacacaaccccaacacgcagcggcggccaatggaccgtcctgatcctcataatatgcacgatcttcagctggtccgagttaaaaacctggtggcgcggcaccgaaaactaccacttcagcgttgaaaagggcgtctcacatgagctccagctcaacctcgacatagtcgtgcacatgccctgcgaccagctccgcgtcaacatccaagacgcagccggcgaccgcatcctagctggcgagctcctcaaacgcgacgacacaaactggctcctgtggatgcaaaagcgcaacaccgagaccaacgccggcgcccacgaataccagaccctctcccacgaagaatcagaccgtctcgccgagcaagaagccgacgcccatgtcggccacgtcctcggcgaagtgcgccataacccgcgccgcaagttcgccaagggcccgcgtatgcgccgcggtgtcctcccggactcttgtcgcatctacggcagcctcgagggaaacaaggtgcagggcgacttccatatcacggctcgtggacatgggtatcgcgagaacgcgccgcatctagatcactcgtgtatgtgttttactttgtcacaacccatctacagcatcgctaacagctatcagcattcaacttctcccacatgatcaccgagctctccttcggcccgcattacccgaccctgcagaatcccctcgataagaccatcgccgagagcgaggagcactactacaagttccagtacttcctctcgatcgtgccgacgctgtacagtcgcgggaagggcgcgctggacgcgtacacgcactcgccgcagacggcggccgcgcggcacggacgcaacacggttttcacgaaccagtacgccgcgacgagtcagtctaccgtgctccctgagtcgccgatggttgtgccggggatcttcttcaagtatagcattgagccgatcctgttgctggtcagcgaggagagggccgggttcttgtcgctggtggtgagggttattaacaccatttctggtgtgctggttactggtggctggctttatcagatttctagttgggctagggaggtctggggtcggaggaagaataggtcgtcggaggggtatttgacgggcaagtcttctatggattgaggttattttggttgtttcacttcgaatgttttccttgtcttattatatcgtgttccatcatatatcctacgtcaattgcatcaggagttcactctttgcatcgaagttcattggtcaactcggaagtcgagttcgacctggtatataagtagtaattgatcgtacatcccgcatacatgatgcatgcaaactaaacctcaaatatctcccccatgcctacgccagcaccctctgcaccggcacggctatcgaccagatccagacgccagccgttccagtcacgcagcttgctcttgatatcgcgcatccattcaacacgcttccgggcttcctcctcggccagcgcacgcgcgaatgcatcttcatcgaactcgtcatcgaggttttcttcggaaacaagctcgagactaccacgggtaccagggggatgaggggatgaagtttgagcgcggtttccaccaactcccgtaaaggcagcaaagccgctagaaagtactgtggagaaggacgagtgctgctgctgctgggccatgctgcggcgacgcgcatggtcgggtcgtccaccgacgagatcgacgtcgtcgaatgcattcgctgcgtcaccggagacagcgctaggtccatcatccgggtagtactccatctcctggcgcttctcttgccagacgccgcggcgcagatcgaagacctcgccttccagctcgcggattcgccgctcaagacgctggcgttcttcgtcctcgagctcgtccagggcttcatcgtctgcgcctccactggtctggcgagttcgaatccgatcactctcttcgcgtagacgcaggttctcgttttcgatgctagcgatctttttccgcatgacagcgatttctttgtcggatttctcgctctcgcgtagccgtgtttggtgccgggcttcggtttctttgtgaaggttgcctattgcctggagtttcttgtcgagcgtctcgattttcttttcagattcgctcttttcgttcttatactcctcaatctcacgctggaggttcttgaccagagtttcggtggatgtcttgtcaacgccttccttgactgctttctcggaggcccgcgtcaatgcctgcttggtgtctgccagttcacgctgggattgatctagtgctgattgtgtctttgaaactttctcctctagcgctgcgacctgagactcatgtgcatcgttagaggacgtttgggaggcgacctgggcgcggagatttgatatctccaactccatagattcaatagtggctgacttggactcgagctgaagaacaaggtcggctggcggtgactcggttgtagttgtgtttcgatgtgaccgggtctggagttgtgagttctgtcgctgaagagaagcaatctcctccttctatttcgcaggttagcaaatatggctaccacggaaaatacgatatcataccaacgactcaatgcttgcaaccttctcctctgcgtttttcaattgttccctcaacccgacggaatcaacactcgcatcccgcagatcctccacttgctcctcagtcttgcgccagcgcagagttgcttccgagagatccttctccaggcgtttattttccttctcaagctcctcaatcttagtagactgtttgcggaacacttcgtgaaccgactccccgtccccggttagaggcggtaatgattgtgaaggggacttgagcgtagcagaagatggagagggggagacgcttccatgtgagacggaggtcttgcggaatgaagacgagcgcatcttagactggattgacagtgaggcatgtcggccgtggttgccgcgcggtgtatcgagccggactggcagcggctcggcgtctggaccaggagatgtgggcgctggaggcatcggttcagtaggagactcggtgtttgtatcaacggcaagttgcgactttggttcttctaattcctctgcttgttcggaggccgtggcctcgggttgcgcgaccggctcatctttctcctccgcgggggtgtctgcctgcggtgtttctgggctcggggcatcttcagcaggttctgtctctgcggagacctctgcgtccttgggtgtgtcggctccggtggtagtcttcttggccttctttttcttttggagctgggcaacctagagaacaacagtcaagttagcgaccaaaacaacgccatctgtcactcgcggggaattacccttttcttggctgcggccagcttctcggctttgatgcgctccgcgtcgtcggccatgatgaatcttatgaattgtatgagtttattcaaatggaagttgatgagtggaagggagagaatggacagctctccaatgcacggaccacgtgtctgatctatatgcccaaatgagacgtgcaggtacgaactagaggtcgatgcgctagatgattacatagagccactctactattatttctgactggacattagaaggtgagatcaaaaatacaagcctacatagcaatatctaacaaatcctacttccccagctccatactaaccggcaggtatatatatatatagagactcagagcgagtgagtgattttctggtttttctaggttgggttatttcagacaattatccacgaggagttggtaagggtattgatcagagattcagagtcaatacagcttgtttacttgacaagaacgatgtgataggggaaacggccccagagagttgaagcgtggaagagccatttaatgccttttgccatgcgttatggaggaactctgtcaccggaggaccgtcatgtcatctcttgaggttgatcgagatatggtgtggaattacgtatgtcctggtcgtggtggtcaacaaacctaacaacgggcctcctcccgtatttccattgggcgttgcaattaatccacctgtcgccagcgaagcgaggaggggtctggacgcccttagtcttgctcctttggaacaactgacccgagaagagtctgtagggttgacataggatggtgtgatccctgggcttcggtgctggtcatggcatatggatgactgtttactgtcagtgacagcttccaaacgaatatcaggagtcaaaagcaacaaaaaggcttacttcctaacattgataaatctgcataagacagcacaaatccaaaaatagacatagtgatattagagagtaagtcacagaaagttgaggggcagtatgttaataccctctcgtgaacaagaaaccatgcaaggaatcgcgccattcaaacaaagaaagaaacatttacccaacaccgccagctagaaatatcatacccgatcaacggggccataagaagataaacaagaaacgaacaaaagcaaaagcataaagccaagtcattgatatatctagacctccatcgagtccgcaatttcttcactcatcgcgcggactccccgacggttggttggcatattctcctcgtcgtcactgatcacataagtgtcgtagtcatcggtcgtccgaatcgtcttcggagggcggtccatctcatcatcactgtcgctggagataaggttcgatctagcgcgttctccaaaccaaaacttggcacgcttgctagagctgagatccggtgtgaggtatccgtcgtcgtaggtccgcttcccggtaggcgtagtcgccatctcgtctggggtgtggctgagtataggaatcgcgcgtaggaagatgtaacaaacgcgcttgcgaatcgggttgaagaagaagaaatgtagactccagatagctccgtcatcggcatcggaagggtcctcctccggtgaatatgagtagatcgaacactccttgagcgacatgtgttcatctatcgttttccacacccgtgggccccaggcagaagatgatcctgctgtgtatgatccagaaagcgtcgcaggggatgccggtgataagttgatgttctcgcgcggtcgcaggttgagcagcgttgagtcgaccgtgttcatgacgcgtttcaaattccgttcgcgtcggaaatcagtggggcgtaggacgtgtgagaagtcataatccgggtgacttgcgttcagagtagcgatcagataggcaaaggtccgtcgactcgaatggtcgctcaggggtccgaacgggctggaacgcgatagattgagggcctcggcggcatcgtgtgcattaggaggtgaaagtgaagccgaaaaacgaaggaccgattcatattgagcctcgagcgactgttcgatatggttgtagagtttccgatcagagcgtgccgccttggtggtgtaaatatcacagccgccgacgatatggcagtcggtcgtatcgaaatttagagagctcgtcacgtcctcgaagtctggaagtgggaggaactatatcatgagagagtgagtaaactgagagaaagacacgttgggttgcgaccgtgaggcataccttcatcgtgaggttgaaccggggtgtgtatccagataagccgataaggagcttgaaatgacctgtcacagtctgctgttcgaaaagaatgactcaggtctctcttctaaggtctgagagagagataagacgagggaaagtggtgttaccgcaacgggtgattgaaccgaaggtggatatccgatgatgtagatgggcgataacggcaaagagggttgggataagggggacacgaactacactgggcagatcgccagtcttatagcaagtcaacgccaatgtcaaatgaggagtatacaaagagatgatgaagcaagaggggatgggcctatccggggatgatctgagaggggagggattccgaaaacagtcacgtgtgggcaggcgtggcccagtaggaacccgcactgacctcacgagcagtccaaccatggaaagggcaacttcataggccaacaggcccattcaggctaattcacagcccaatctcgtccaaattgcgtgttatgtcttccgaagcctgggggaaacgagttgtattgattagtatggtgaatgtgaaaaactcctatgtacgcccgcaaataaaaaaggagcaagaatcctgcttgctgcgttacatgatcttggtgaccacatcttcctcaacctggggaataattagcccggctgaaacttggccatggctggacaaaggggggggggggataaagagcnnnnnnnnnnnnnnnnnnnnnnnnnnnnnnnnnnnnnnnnnnnnnnnnnnnnnnnnnnnnnnnnnnnnnnnnnnnnnnnnnnnnnnnnnnnnnnnnnnnnnnnnnnnnnnnnnnnnnnnnnnnnnnnnnnnnnnnnnnngtcgggagcagaagggggggggggggggagataaagagcccaaatatagccagcagcaccgttcttggttcttttcgttgaaagtgccaaacaatacccatgaatggaaataaaaagacatcttaactcacctccatatcttccaaactgtcctgctggctgatacagcgaagaacattcttcttgctggtctcctgcatctcccctgcaatcaataactcatcgaggataaagtatgctttctggaagttgaagatgatgtccagctcgcagacattgccgtagtacttgtccatctgctcgacgtagcggtgcaccacctcgagggtgatcagctcattatcggtcgaggcacagccagcgatgaagaagagcgaagcgtagcgacggtaaacgactttcgagtctagtgatggagtccatgttagtccaattccagcttgtcggcgatagggggtaggggtcgggtcgggggtagccacctttgtattccaggaaattgcacatccgcgtccggcgggacagcaccagctgggttacatctttgatgatcttggccttttccttgggggagagagtggtgaaccatttggcgaggcgctagggaaacgttgttagttggggcggcttcggccaggtgttaagtagttgggtcggtgacgaggcataccactttgccctgtcgggagagcagaatcaggtagctaatggcgggtcagcggtcgcaaattgaagctgactgaaggacggtctcactggataggcatattggtggcgttgtgaaatgaagggatggagaaaagtgtcggggcggaagctctggagaaattctttgggtggagcggaggggagttttgccccgctaagccctagcttagcaatttaaacgtgaagattcaatagttcgattcaagatggatagttgtttctgctagaagtcctaatatgctttgtgcgtgtcttgcgcgcggaccttgaatgagtcaacccttgcctgccggagtttctggaaccatcagcttagcaaagctagtatcagagcctcatgtacggatttggagtaaaatagaactgcataatatacggtcgggctattgttatttgtttatatgtgtgcatgctatgcgacctatgtatgttcgcaggtgatctataaaaattgtggatgcaacatacggagaagatgagctcaaaccataactataaggatgtcagagatccatgacttggagaattaagtaaatatttacaactaaataaccagagatgtcaaactatacggacatacggcactgaaagccacgtctaagatcataaagtaaaataagagtcaacgccaggtaaacccttagacgatgaaaaacaaataattattaatgaaataagtagtagcacattaagtatcagaacatccctctcatgatcgagcagagactagagaggcagcgtttccgtcgaatcgttgcaggcatgagagcatgagcatggaagacataaaaccaagaccgagagccctaagctcgtcaaccacctcaaacatataccgatatcgctcaactcacgccattaagcagaaccagaaccatacctatagccatgatccagtatcaattaccaggtagatagattaccgcgacaaggcgagcgatagcaactaagcctcaggccgagtgtaaaccacgcccgctttccatgacaaacgacccatttaaacctgggtcatgttggggcgggcaccgccgcgacggctagtacggcgcgagggaccagcagaggaacgggccatgaaggcggagacaatgacggaggccatgtagccggcccaggcgaaccagaggaaagcaacggaggcctgggcttcacggcaacgcttggtcatgttgtgtgagccattggtgatctcattgttgataaggtactcctagagggagttagcgttcgctctcatgtcttatatttgcaatccattcaagtcaacttacgtggttggtgcaagagtggcactctagcttcgccgcgagcgcgatggcagcgcagaagaagaagatgcagttcagggcgtcgatgatgatcatgatgagggggtggccggaccagtcgatgttgaacgaggctgggaccaggtagaacaacgtgaacatcgagaagaccgatgtatagatggagtagtttacggtcgctgggttgccggcgaaagcttcagcgatcatgttaccgacgagggccatgacgagcagggagaatacaaactgtaatgggtcagtactatattcaacttgggattcttatagcttcaagctttaagcttctagctgtcgcattgcaattgcactcacctcccaggctctgagaccgagctgcacacctctgagacccattttgtagatttagattaggtcgaggttgatttagatccgattgtcgcgttagatcgcgaggaggcaggctggttggaggggtataggatggcgaagtcgagtaaagaataagcctataggtcgattcagcagtatataaaagctctgggaaaacgtcgacgttatgaatcggatgttccggagctcagtgatgacatggaaaagcaacatcttcaaaaccttaaaggtggcgatacgtcatgcatccggcatacagcggcctcattggactcggttgcatgtacagtggtgggatgtcggagatgaaatcatgagtggttgcactctggtcgatgatgagttctcgactagctcaggatttccttgaatgaggcctccattgctgttctttgatccacttgggtttttttttctcacaccagttttgaagattctgctggaagagacggggggattcaggttccatttccagtttgtgggtttcccctcattgacagttacaggcttggcatttctaggaacggcgctgttggacgatgtcgatctttacgattagtggctcgataaggctgagatgattgaattctacgattgaattctaattcgaacaaaaagactgaagattctattcaaataaaaagtaaaagagaaaccataaccctccttggcgttattagcaccacactaaccaagagagttatggaacccttattggtagtttattttactttgacctatataaaagagagagaacacagtgaatctttcaattcgatgccatatctatgttgtacacgctatgaccttacatctttatccgacacaatccccgctaaactactgtctactaccctatatacttttatatagatcttatttaataatttagaatttggtagttcgtcttggtaaaaaacccactttctatgtctccgtgagagtcttcttatagctgctcaatcaacaataaagcttgcttcaatttcccagcgacaacagagtgtccgtttcgtgttgctgctttgattgccgtttccatcatctctccgggtgcaggggcgtcgaaattcacctgatctgtgagtagcacgttcaccatttcaaagtggccacgctccgctgctgcctgcaatgctcttcctctgtcgtatccggacgcaggcaccgcgacttcggcccgggctgcgaggagcctctccccaattttccagtagccgcctatgactgctaattggaaagctcttgccccccagacttcccaggacacacttctcttaacatttgcccgagcttcgagtagtcgttccactatttccaagtgaccaccctccactgctacctcaagagccgaggatattgtttcttgatatccaaaatccgccccagctgcgagtggtttctttactgtttccaagtgaccgtgtgccgctgctccttggagtgctgtttctccgatcatcctatgtgcaggaatatgatgaaccgcctgggctgctaacagtcgctctaatattttcaaatggcctctctttgcagcggctagaagtgctatgcctcccttgtcatgtgtcccaaatgagttgatttcctcggccgccataagcaaccgctcgacaatcttcagatggccaccagctgctgctaaatgtagacatgttttgccgcgtgaagaaatcggtctagcaaaatcggctttctcgctcagtaatcgctccacaattttgagatggccgccacctgctgcagcttctagcaccgaacagtcgtcaagaatagtattcacgtcggctccagctcgaattgaaagattcaatgaaaagatgcaacctgattgagcagcaaaaaacaccccatatttcaagacctcaagggaacttcctcttgcaacgatcaagtgcgtaaagcgaaagcgatatttcataggggagcccttcaagatttcacacatcgcttcctctgtgagactgtgaggttgacgttgcataatgtagaccaacagcgtaagatgcccggaactaatcattgcctgaactgaggttgaattgtggctttgttctttttggtcccgctgcatgggctcccatggtttttgtgccgatatatcatcgtcttccatgcatcggcagaagagcttccatatcttctggtgcactacaggatttatgagcgttgtgtggtagatccaatttgtctcggcatattcatggaactggaattcattgtgttgtaccgggatctgaccgggggatttgaactcattgcgaagcgcttcaattttgttttcaagttctcgagcactaatgccctgcagctgatgacgacgagacagcagtttcagtgctatttggttggtcgcaccattatgactatgtatgcgcgagagaccaagctgaatcgggtttagtcgagtattggagcttttgtcggctctcgtcaactgacgcttgaagtcggaaaaatccaggtaggtcatgcagagaaacccgagatgtcgatcgagtttttctacgtcgaattctcttaagtgtgcgctgttggtggtaaacaggtattgcttgacactttggtgaacgtaatggacagtgtcttcttcttcgtcaatatacaccaagccgcaacagtcgctgaaaacgtgattcatatcgctggggaatttcccatgttcgatggactcttgtccgggagaaagactcagcgcttctcgatactccatgacagtcaaaggttttttgaagacaccgcagtattgcaacaccttgatcgcgttgttattagtctgtcgatcgtaaatccgagatatcctgcgatcaaatatttccaacaagccacgtggaagattgttgagggcatttatgatgtcgttgtcgcaactttgggcgcagaggtcttcgatgaacaaacgagtccagagaaacctgtttaattttcctgtgagcaatggcatatgttatcatttgtggagggcggcgaaaacaatatatatcaaaaaaaactgtttgtggccgtaatctatggaaaatttcaaggggaactaaagaagaaattggaaattggaattgaatgcttcatcacttacatgccattggatccctcccgtaatgccgtggagatcctgattattagaccaggatcccctaatttcagatcttcttcctcgagacagcgaccgagggtagtcgaaatatagtgatctatgtcccgctcgacgtttacacccgtgattgggatagtgaagtcaggtctgaaaaccccgaaaagcttctcttcaagctcgtaccgaccggcgcagatcagcttgaatcttttctcacggcttttacataaccgagctagttctgatgacacctttttgatctcggcgctatcaaattcatccaacccgtcgagaatcaagaaatactgcttcttaccctcaaggtatgaaagaagcaagtcgataacatcttctgtgtccagacagccgctggtatcctcgagctctcggagcttggcattgtcttcaagatcaatttgcgaatctagcaattgacgggcgattgttccaaacaggcttctggccgatagggatgccgtttcctcggcacagcagatgttgtatgagataacatcattgggctcccgtgatctgtatagatatgccactatattggacataagtgtcgtctttcccacacccattttacctgggcaccagagaacggcactatcttgagaatccttccaccgaaagaaggtggtttcctgttgaagccactctgccgtagaagaaacgcgctgccttaaagcctgcttccatggcttcacaaaattgatggttgagagattatctttgatggtggatctcaatttcgagttttctcttttcaacttgttcaggcgccatccgttggcttgtgtgtactccttctgactttgctcatggaagttcaatgcgcgccggcggaagtacctgttcctttgggtttcataatgcagaaggttcctcatttcctcgatcgcctggttcgcggctaatgtaatctctagacgcacatgttttgcggcttgctcgagctgaattaggagtgattggaactcgaattcgaaaggattgaaaatagacgataagatctgggaaaatggagcccgccgcgatatctccattgttctaatgcaaattcgaacaatgatagcataataattgcacaactcgcgctggagaccggtgcatccggggtagagctgaccaaattcctggtattttggacaagacttgccaattgccatgatcatgcttgtaagcttgtcaaaataggacgagatattgcttgctgacaggatagccacttttaaacctccccaaatcagaccggcgatttgaggattagagctgacaaatgtgtccacgatggtagtgaacttctgcgtcgattcgagaaaattatacagctttactgcaacgcttctctttgtcttagtactgttattggcatcaatctccgccacgaatgtaacaacactagaaatgtctggactttggttgctcatatgaaactcttgcttttgctccttcgtgaggacactctcaaatgcctccaacgcttgtgtaagagctgccgtgggatctggtgttccgggatggcgggagagaggcacaagttcagccatgtcgggcaatgagccttatttgggctatctcaaacgttcaaatacttgatcgcttggagatacgcagtatatcctcgtatggtatgggcggacgtgatagagattaaaagaatcaaggagttgggagttattcagcggcctagcattcggcatggggaagcgatagattcgatttggtaacctgcaaatataaggcaggtcaaaaagtcaggggtggctaacgtcgtcagtatcggtgagaggcagcaggcagaaggacacctgattggcccctatgcgcgcctgcagatgcaacaaaattcacagcctcaaagctggctccaatgttcaaccaatcatctcgttgagacttgccattgacgtggcagtgcacaagagtaagcagtttgaatatttggtcgatgagctagctctccataccattaatagatgctgtcaacaaaagagagtcaccatctagtagtgcgtagtgcgcccgagggatattcagcaccattatctgcctaatgatcgatcgtaaggctcccaactatcttacttagcttaacctccatttattctgcgcgttctatagtaccatgggggtcactaagaaatacccggcctgtaaaaataattgacgagaaggtgtggaacaacatttttgaagacggcgtcttcggcgccgggccttcgctattcgctgtagtcggggatgccgtgaagccgtccgtgagacgggtagcttgcctataaggcggacgaagcccttgactaccttcttcagctgacgcttcgtctcaagggcccgtctagagaatcaagaagtcccgtgtttgatgcccttggtaggtgtggttcgtggtactggcttgtgaagaacccaatgcgtgcagaagcaatggctcgaagatgtcttgatgcggattggaatgattatgtctgtggcgtagctggtacgcagttcgaatgagctgccgagtcttgtaagttgttggtcaactttaacagatagttttctttcctttccctgtacttagtatcttggtaatatgcactcgttctcctgaactgaattaatggtatatcacttcctctcagactcactttcaactcacctaaatatatgttcaatctaggtagaaattaggtaaacaaacatggatgttaaagttattagtcaacgcgcgagcctggctgattgcagtggtataaatacccttccatccttaggcttgatcatccttcctcttctcattcacatctcaggatcaagcttcctggggcttactacaagaaatacgttgtctataggcttcctagccagaccagctcaatcttcttttcatttatatccccaggagatgggagaccctagcaagcccaatacctggataaaggacgttcatgatctgccaaacaccgttagtcttgttgggatcatttacgtcctatacctcgtcgggcaggttgtggttaattctatgactcacttccagaagctgaaagatacttgcagagtaagtttaattgatatccctccctatattgagagcagttcgaaggatatcactcagacctgaatactaatagtcactataggaagacggcgaaatataccatggatcccgagagcatatgctacgggctggcatagctgaagtcgccgatatgcggtcattgaagaatacgagagcgaaatggctggatgcgagcaaggtaattactttgcactcgacgtcaaggtcatgccaatttatgagaaggaaaagaacattttcatggctttcctatatcaacccagtcacatggggttctttgctgcagctggtgattcgtcgtcgtctgcaccgagtttgtcaagtcccacttccgatggagcttcgctccgcgagttgacggacttacccaggtcattacggctatcggtcgaacctttgaacgctcatcggggtcacccgatgagctatcctttggagatgatggcgggccggatcgaagggcggaagtgagtgatgcagcagagacggtcaggcaagtccaattccttctgcggtatggtgattatgctggcatggtgtggaatgttctacgtcggatctcgcgactttccgacacgcctctgccagactttgtcgtctcattcgataccgacctcgacgttggtggagaagaccaggatgatggagcattgccaggcgggacccccgcaaactctgatgccactgttaatcgcgattgtacctatgtccggcccgatggaaagtccaatccaatggaggtgtgttgtcttggacgaatcaaagaaggagaatactatcggtaccttaaatggatcatatatgaaactgaaggtcagtattgcaaaagctagagttgagtattatattaatggtataataggacattgacaacaaaccattgacatccgtttcttacaaccgtcctcgccgacggtatttgtacttctgtttcgtacctgaatgcaaagagccgaggaaccagtgacgaaaaaggttaaagccacgcgttatcggccccccgccggcgagtagcaatcggtcaatactggttaaattagcccgttgttttaggatcggaactccgatatgtacgacactgcaagcactgggtgtggaatcgacggcgatcaatctacccaacaacagggaggagattcgaatcgacgagcctatggtaaggtcggcaatcaaggcgtccgcgttgcggaataagctctgccacagcagcaatcttcgaggtaccccccagacatcacagtgcagtacgatggagacctttagaatttagtggcactcgtcgagactcgttccttccctttcgaggtcgtgagtcattcccttccccaaatctccgaagctgactgtacggaccatcattgcgattggtcccggtccagcttcaaccccacaaccttattcctgaaccagacggaaccgaccaatcacgatggttccaccacgaaacgcagcgatcggcaagggtaaacccgcgacagtgctagatcgacatgaggaagaaccggttgatcccgaaacctcaaaccccactggtgtacaggccctcgttgaaagtatcgagcatgatgatgccggagaaggccctttcaatgttcgtgcgatcctcgacgcaactccgaatgatgattgaattctatattctaattgaaaagaatgaagcttctattccgattagagaataagaacaaaaaaagtaaacaaaccctcgactctgacgttattagcacactctaaccaactgagctatggaacccttaacctttgataaaatagtttcttctacttaatctatgtaaaaagatagagaacagactcaggtatagctttcagttctatatgccatacctatactgtatgcgctatagcaccttacaatctttatccgacacaattcggttgtctactatgggatttatattgttatgtcttttttggtgtcttttttggtatatcctatactgctatttggagccttttgatactactattatataacttttttatatagaaagaaagaagaaaaactggtccaatactatggagttaccatggagcatatgcttgtatatagtatctctcttaatgcgatatcacttcctcttactagactcactctaaacttacttcaactcatctaaatatatgtccaatctattcgctgaatatggaactacagaatcgataggataaccccgtctatattcgcactcaatgataatgtaatacggattactatacaatatagaaaccaagcaaacgaacatggatattcaagtcatcagtcaacgcgcgagcctggttgattgcggtggtataaatacccgtccaccctccacccctaggcttcttcggtcatcagctctcatcccttgatccttcatcctgtcattcgtaccttaggatcaagcatcttagggctcacacaaaaaatatgttgactataggcttcctagccagaccatctcagtcttcttttcatttacaccccaggaggcttgatccttcttcttctcattcgcatctcaggatcaagcctcctggggcgtaactgcaacagatctattttctgtggccagtattgggtctacttgaggcttcttagccggacatctcagtcctaattctactttcatatcggttgttacggcctgaaggatcgatgggtcgttcttgcctgtgtgggaagcaaacattccttcctactaagcgagcataagcgagtatatctgcatttgcattgtttgacacgagacgcacaaaaccatctcggctcctcgttggtcttttcttttattctcctttgattgttctttagaatgcactctttgttcaataaggtgcataacctcgcttatctcgtcgacactgtctgtgtctgagagtcaccaccattgtttgcccacaaaggttcctgacaaattctttctttcgctttcatcaccacccatcttccttttttattcaactcaaccatcgataccttcgtctattcgcatctatccttggaccagcgtggctgcgttttaatctttgttccaacctgactacacaccaaagggacaccgtccagatatcaagcggaaacaaacatcgctttctggaatgaccacaactatatggtcttggatatgtggccattgcagggcatgagaacgaaatggctggatgcgagcaaggcaattaatttgcagtcgacgtcaaggtcacgccaatttatgagagtgaaaacaacactttcatggctttcctgaatctaactcaacgcaacaaaccaattgtctttgcgcgcacagcatcgaaaatccaaaagtcacactcattgccttagaaaatctcgatcatttgaatggatagatcaagccagctattggcacgtttgttcgactctttcagatattgaatcgtctcgctcgctagcttatcttgattctagctagcagcacgaaagggccgagagatatttgaaagacgcggacagatgtgccaacaactggcttggtctatccgttcaaacgatcttggctttccagggcaatgagtgtgactttgtgattttcgatgcggcacgcgccaagacggttggctatagcaaacttccgacgctggcatattgcgctagcctctggattgtctaatctaaccatatgtcctaagaatcaatcccgttgcccaagtcccaagctacattcaggggacatgcaagtttgtgagttcgaagcagttgaaaaacgactctcaaaaaactagaaagtcagtcgtttccggatattcctcgggatacacgtgcttatcgtatgcccagttgcgtgctactcgactcgtcgggttctgcgcatggaaggaacggagcatggaccgcactttcatacagaaggaaccgttccctccatactggaacactcatttgcatggtttggcaagatcgcctacaaagctatgcaatcgggacgcaagtaacattactattcatgtgttaaatcttgctctttctactaccggtagtcagtctgctcctggtgagccttctcacgggtaggcgtcctaagttcggcactgctgcattgggtcagaagtgacaaaatcgacatgaccgatgaacctccattttctactgtatctctatctctagaattgaatcaacttgtctaccatatacatactctaagtgcagttatttgatacacaagtatatgccccatggcaactctaactaatgaaggttatgccgatggcatagcatacttagtcgcccgtctacgtagcattattccaaccttggaagtgtttccattgcaatagataagactgcatacttgtatggataaaatcaaagttcaactccagcaactatgctcaaccaccaccagcccacaaccccaacccccactagctctccccaaaggcactttgcacagatccatacctagaaaagtcagtataattcataaatcaaatccacccacaaaactcacccttgaggacactggctacccaacgcaacactaccactacgcatgtagcagaccttagcctcctgacacgcggcagtagtgcacgtaggactcttaacactcttcttcccttggtaagtattatgcaaactaaccagctccacatccttctccatagcctcagtaacccgatgccagaaagtcgcattcaacggtgcgtcctcatcccacgcagctgcggatccgtacgcctcacgggtagaatattcaatctcaaatgtcggacccgtgtgctccagagccgggaattcagacacattgctgtagaaggtgtatgcctcgtagatgttaaagtcgcctgtatcgacttcgtagagacggaatccgctgttgaggtttgtcaggggtgttatgctaggcatgatccagccggtggtgagggcgttatcggcattctgcgcagtcccgttgttggcgtagtataccatgaactggtcttcgtgggtgtgtccgaagaagatgttggcgattacgtgtggcgagtagcggtctacgatctggtagaatagatcggttgggttggggagggggttggttccgtcccagccgctgaggacgtggccgattatccagacgcgctcgccggcgtcttcggctttttgtagttcttcgatcatccaggagaatacgcctgagttgtccgggttggtggtgttgatgaatgttaggaagttggttcggtaccagaagtctgggagagtgagcgggtgaatactaaatatgggatggcaacatacctgtgttgaatgcgagaatgcgcagtccgtagtgcgtcttcacggagtatccgccataatgcgttctcgcttcatcggcggtctcacggctaatccagccttcatggcgccacagtccagccaggtgctcatagttccagctttgttgttctcccagacggccagggaggttgtgaggagagtcgatatttgcaggactggtgtcgtgatttccaagtgccgcaaagacaggaccagagagatagtgcttgaacatatcgttaatactagtctctgtatactgggtcaatgccttggagatctgggatgccggatcatgcgataccaggtcgccagtataaagtgtccatgcaagatgctcgtcgtgttttcctttgccagttccagtcagaggaccaacagcttgcagagcagcaagacccaagtcatatggggtatcgcacatgaaagagccatacgaagaggcagaaagcagcgggctgccttcggaaaggtcgttggagttgtcgctcctacagcagaggctagacgtgcagtttgcttcagaactaacggcataccgggcatcgagatggaagtctgacagatgcagtaccttgacccgctcgccacttgccttgggaacctgggcatctgcaggcttgggcttggggaaaagcttggtcgtgtcaagcgggctggtagttggcgcactacaaaacttgctgctgagagaatggcagatgtattcaccatccaatccttctacatcggcgtatgccagcacctgcgtccagatagcaccaaaggtgtttgtggcgaaatcttgctcgcacgtctcattggcatggaaggcaaaagccttgcacaggctgaccatggcgttcgggacaaaggtcggggcatgcaatgctgcaggcttcgctgcggctagagcgttcttgcatttggtgcaattgtcttctgaactcgacttgatgatgttggtcacattggatagtgcttcttgaaacagcctatacctctttttggcagacatgtgagttcgcggcataggaaagtagacctcatcttgattgtctgggatgttgtcgggatcagtcaactcatagggaaaggtgaggtccaacacaggatcgtagataatcggctggggttgttgggttggctgggccggggaaacatagtaggatcttgcattcacattagcatatgtgcctaagctaccagactatcagtaatcatacgagaatacagaggtcggaaacccagcagcagccacataggacgcgtcaccagggagtgagacagcagcagcaaggttcaagatcagagatgtagtccccagcaaggccagggccatcttggatagacagtgcgccattactgcaggcgaatgaaatacagcagagaagaatgagagataagcaaagaggaaaagaggtatttacatatttacatacttatgtactgttgcgcaacataatcgcaggtccgatgcacgtggtggtctatacctatgggattcatccgtcgcctttcccgtggcgcagagatctacacggcattgcttgattcatcttagttcctggatgtggaattcctctgatttctcttttttgtacctaagccctcatgtagtatactagctagatgctaggcagtcgaagctttactatgttcaattgcaagtcaattgcatattgtacaaatattaaattggtttgagtctgaacacgctatttaggatctaaagtctgggtggatacggcagttttgggccgcgccaaccgtcgggttaaccagctgccatgaatctcaatgtttcttgttaatatatgggaatggattgctatgatacggggttaatataatcagatcctaataaaagactgattctctactatacaccgacaggagcggaattgaaggtaggatcggagcagcatcgtcggtctcaatgactttcgttatacagtatagctaccctctcccacgccttcgctgagtcaatccctcagggcgcttccgaaaaaattccctaggaatgaaatttccatcttcatcctgcgccgtcccatcgccctcatcatagacaggaatccacccatccggggcattcggacacagctcgcacatatgatcgaattggagattcaaatagagaggccacaacgcccagaccagcaccctcatatatccacaatcagaaggcgaatcatacctctttccggggtcataccgtccatcaacgaccccaacaaacccgtcgtcagggtcatcagtcgcaacaagcgagttcaacgatctctcatcaatcacaagacggacagcaaagcgagattcctcgcagtgttcttcctgcttaatctcacgcagatactgagcgaaatggccgcgaacttgctcgataccggcaccgtcccaacgactcgagtcggagatgatcacgtccttgtgggactcttctatcagatgctcggggcgagggtcatccccatagttcaattcaccctttatccatgtagtcatcacgcgggttagcttttccatggcgatcggccacaatttctcagactcgggcgtgtagactgttcgatagatgatatatccccaaggaaaatggcatgggaatcgttgggttaggaatcgatgggtaatgcgatctgccgtgtttctgtagcatggctcttccttccactttgccatggccttttcggtgaagtctggatggtgccagcgttgtggccagaccgggtgatggtagtgtttgttataatctacttccgaggcctggtcgatggggttgaccgaggcagattcagatagggacggagttgaattcatctgtgggaagtgacacaaaataagcgaaaagagggagagaagacaggtagtaaattataggagcaccactttgacaaggataggaccaagggagaggaggttcacgcgcgggtattgatggagaagacctgaaaaagacctgagaaggtttaaataggagatggatatatttgtttgaatatacttaggcctactcatcgaccaataatataaagtcttatgattaatccaaatagtgtaaacgtaaacaatgtagtcttataaactacatggagatagttatagagatgccgggatttgtatgggcccaaaggcttcgcgcaagggactcaaaaccctgccgtaggtggaagtggactttcgtacgtaagaggaaagtgaggttgacaaccctagtataattatattatttcgagcccagtggcttcctatctagcataaactcattgagtggccagtctctcatggactttttctttagatacatgaaaacaatggtatcccaattccaaatcccaccaatcatgccgcgaaggcttaacgtccaagctgttctgtgtgaccactatgatatagggccagcgactgaagatgcatgcacggaacccgatagcgagcggtgggaagcgggtcaactcccagatgatagattaatggtgtatccgtgcgggagagcagcaatagtccgattggctcgagcagactgatacaatctgtcgtgctcatataggacatcaataggaagaacactaccctgttggcattcccaaggaattgggggaagcagaggatgcagatggcgatcagcggatcagtaacacccagagaagagtcgtgggtgtgagaagttgagagccagacaggttgcgtgctgttgagcgcaggctggtgataggatcctggaggcggggtgctcgaagcctgttgagcttgttgacttttggatgtcggaggtgatggactcaattcggcgatgaagagtaattagtgattccaaagcgagcgacaagtatcaattgtaatgccatgtcgctgtacagcatagattggattgccacatttcttcgcgggcgttgaatcaactttgcgcttgttcatcagaacttgctaaggacggcaccgcgggcacagatagataaattgcacgctgatgtattcgccgtgacagtcatggaatgcactgccaaagaaaatggttgcctggaatcttgctcggactgcatttttgtcggaacaccatggcctggcgagcatggacaaagactgcaatttaattatcgagagcgccagagatcaacggcgtagtgtcacccgcccagaaagagaaaagaaaagacccgaggccgatcttcagatcgactccacggccagtctaatcatgggagccactggacgatccactggaaggggcctgtacacagacgagttcaaccataatatcgtttgggttgtctggcggtgcactattataagaaggagcgcgactgatgatgcccacagccacctgggaagcctgcttgtgggcgctcatgtgatcgagataccagacctgccaaggccaagcgcccgagccaggtggcatgatagtaacgttctgaccggggactcgttccctggcgaaatctagaaaagttagaacataacgctaggcagaaaattaatcgacatactttggaccggaatagcggcgacgtcgagagtgggcggcggacacgaagtcagcgtcggcggctggatcaacatgttgttgagaacggcctcgagaggtttggaatagtattcgcccgacacggcaagaagatatatagcattctgcagggcggttttcagatcacgggaacaatcagcgccccagataccgtcgcagccattgttcgcgccagaaggggtgccggtcaaattgccgatcctgagaccgatttcggatgtgcgatttgagtcgacagcactgaggttgatattattattttgatatcccagccaaaacgccgtcttggtcatggggccttcgcccttgccggaggaactggcatcaaagccgtagtagagcgtgacggggtccgggaataaaggtttgaggtcgaagcggattgcggtctgagcgagggagtcgatacagccattattccagaacgagcagaactgagcggagaccgattgtagtaacaccaacagggctagagataggctcaggtggaaagccatgtccaggatatatgtccagcgagagtgaccgcggaggccctcaaagtcaggataatcgagagcagaggtagggcaaggtcattacggggaaaggaggtaataaagggtgggagattaactgataaaaggccgtcaacggaagccagggaaacgggtccccgcaatacctactagggtctgaagagaatgaggctagtgccagtggaaagccccccaaaaaagggtctgattgttatttcggggtcctagggagaacgaacaattggcgctgccggtcgaacttgggaaaaagaaaggaaaagaaagtgccgagcccttgccaaggagaaaaccaaatatacagattgttgcgacttgtatgtattatttcaggtttctcgcattcttgtgagagcgatgtgatgggggataactcgggtacctgctgggtacctgggaggtacctgctgcaccctgtgggtttaggggaccaacaagtctcctggatgtacccccttgattggaaagggaatcttattttcagcgctaaaccagaagtccccgcattgctgtcccaaagaggaagttattggtgtcgatcagccacagggtaaagcagggtccagccacttagatgcgaccgatgcctcacacttggcactgcggtgtattggtattgtattggtattctatcgatcctttccttttctgcgtttaaggtcagatctcccggatttgcatgacctcatgttcattccagacgtttgaattgctagcaagggtattctgtactttgacaataataataacacaacacccaatccatacccggatgagatctgtgcgatatgcacgtcgtgatgcataccagatatgtatgatccttgcctgtgctccgataggctcgacggtaatatagctcctctgacgtaagaaaaaagcctgaaataattggcactcgctgcgtcatttggtttcaacgtctgaaacactctctcattggacgttgcgatctcgggttcgcatgttttcagccagagggttcttggctgactcggctgtgttatcgcgagacaccggagtccacttaatccagtaatcctccgtattcacgttactccgtgctcggggagaaatccctcggaaacaagattaattggaatgccggcttaccttctaactttcaggtatgtatggagtaccaacattctgggcatggaatattcgaaaattcgatacataggaaagataactgattttggattttgagtagggacctagaataggaaaggacagacttttcaaccaacaagccgagcgtatattaggctagggagttcaaaacaatacttctcgaatgtcacacatttcacagcctgcaattcatcgaactcagtccgcgtgatctagcctgtcatcggcggagttaagccacaggtatctctcgacgtcggcgctttgtgcctttttaaattgtcaagtgggtcattcatttgcgagtgagactgagtgccgggcacgccgtacttgtcgatggccttaagaggcaagaggtgtggcatgtcaacaatgcgcgttgtcggtcatcctgtcttgcagcttgatctccatactatactaaacaaacatgaattgacggcaaacgaaagggcgattgaaactttcttctgttagaaattagaaggcccgttgtgtaggtacatatacatacttcaacacttttggcttcaggtcgtatccccgaagcaagtcgcggtgtggtcgcatggaccataagaccgttcggcgaaagtggtattattgacgaatcggaagcgacacactcgatgaccaccagttcgccaagctccatagaatatcacaccggcaggggcgagaaaaaaaatccaaaaatccaagaacacaaagatagaaaattgatgcatattgtacaatgaaccaaatgagcgttaacatgctccccttaacataatgtacatccccgaggctttgccccatgcaaacagttagacatatacaaattcgaagatcaacaatcaaaattggagggagagtttcgatcacatccccacgccagaactccacgcttgaaaccagaatgcaatgattggtagattacccaaaacctgacagtccaaatcagaaatggacgtcaatcatttgtcgttctcaatggaacgatccttgccgtgcagccagacacgcttccagggaccgtcaggtccgaaagctgcctctcggtcttggcgcatgccttccaggacaccaacaacaccgccactgcgcagacgctcaaggacaatgtgcatgccctgcttgctcttcaatacggcctccttagtccgactcacaccgatgagctcaatagtccgctggatgccggcagtggaaaaggacgcgaagaatcccttgcgaggctcttcctcttcatggtccccagtgtcctgcttctttttcccgagcagcttgccctgaccgagtcgggagcggaaggtaaccgtagtcttgacatgagtctgttcgcttttgtcgagaccatcgagggccaggcggtcttcctgggacaggagtcgcttgtagcattgcttctcgaccacgctcaggatgcccgtccactccatgttgcgggactcggtctccatccacccctccttggcgtcaacagtggtcttctcaaggatatagctctggccggaactgtctgagccgcccatgccttttggcagaagctttagaattccagaggggatcttggactttttgaggtgtagtcggatggtgtgcagacgctcggtcttggggtcgacgtatcggtcaatgacatcggtggtgagaacatggcgggaataagggttaggatagcggaggaagtaggcgagggacacggcggggaaggagtagtcgtaggtgaaattgttttcgaaaaacttcatgatggcattcggtgattcatgtagatggattgaggagaaagagcaaggagtcgtctgatccagcactttttgcctgggcgagcaaaggtagaagtggggatccaaggggattaatagttattccggggaatcagatgctaaagatcacatgcatctcacgtggtccggggattaggcctatcatcggcccgcaatagctaaacgatgtagaccactctttttgtccaattgaagccaagctgatcaattgactctaagataaatatgaatactgaaggaggattctgcataagtatggatccaatacagtcaagtccgacacagattctatactccatgtacataaaggaggtcacgtgccctctgaaatcaacatccaatcacccaaagtagcggtcaagaacaaactagaacccaacttatgatactacgagctatgacgggctatcaacgaggcttctcaagatccatacatgaacagtagagagacacaccaaacaggaaaccgggttaggctctcggatagacacgtttccgcgcaatctcacgtgatatcaatgtttcacccgttacccggatgtgtattgcaagcccctttataggccaacacatcccaggctaggcagaggcttaaatcgcgaatcgaattcgaggctcattcaatacaacgcagaaatggtccagtttcatgattgatcttcatcctctacctttataaacatgcatacaactaccgatcccgtccagactatggagactcgtatccgtatcaacattaccgctcggcaacgccaactgccatgagtggtccgatgtcctcaaggcaaaccgtacctcagaaaaggcgccctcccgagccgactctcgaggtcaaaagtggactccaccgtgtccaatatgaacggagaacgggtagaaggcctcccgtcgccaaaatggacaaatatttaaacgaggtcttcaatctcactcgagattcactcacttttattcctatctatcatagtcctccctcacaatgtccgaacaaatcctcgcaggaaagacatgcctcgtcaccggtggcggcggcggcctaggcaaagcaatcgcaacgcacttcctcgaagccggcgccaacgtcgtaatctgcgatgtgaacgaggaacgtctgcaagcgacctcagccgaactctcccccaagggtcccctgaaggccatcaagacggatatcacccagaccagcgaagtggagagcctgtttgagacgctgattggcgaatacggcaaaatcgacgtcctcgtcaacaacgccggcatcatggaccacttcgacccgatcggcgatctggacatggagctttgggatcgcgtcttggcgattaatctcactgccccggctctgctgagcaaattggctgttcggaacatgctggcgcagccgaagccggatgggcgcattattaatattgtttctgttgctgggaaggctggatgggctagtggtatgctctgaggtctctactggatgatgatctgagattgactttatttaggtgctgcctacacggctagcaagcacggtctggtcggattgaccaagagcacggctgcgtactatggcaacaagggcatcaagtgcaatgctttgatgatgggcggcatggaaaccaacatcgcggatgcgtttagcaagggaatgcatatggggggctatgagaagatgatcggtgtcctcaatgccatccaagctcctcccgtcgacgtgaatgaggttgcagggttctgtgtgaacatgacatatggaaagggcgccggccagatcaacggcgcgaccatcgctattgataacggctggacttccatcgtcgggtagactacgactatataggcatgttcttctcctaatagtgtatatatgacatacatacatccatccatcaacagctcgaaaaaaccaaatcaattcaaaacacctcccatcacctagaactaagtaaccaacggattcggcttcggcggctcctgttcccacctctccacaccatcgggaatatcaacaacagcatgctgacaccaaatatgcacagccgtcctcatcatccccctatccaaatcctccaaacagccccccttaacattcgtaatcgccgaaaacgccggctgttcgcccggcgcaggcaccgcatcccggaagcgatgcaaaagccgcgcgccacaccccctgcagaaaagacactccaattcgcgccccttgagcgtgacgcgcgtgtagctgtccaccagacccgacgcggactccgggagctcgaagtacgggaatgtggcggtgatgccgaatgcggaggagctttggtgctggcattcggtgcagtggcagatccagagttttaggggtttgtcggttggcgtggtgaattggatctggccgcattggcagcgcgctttcattcccatcgtggtgggtgggatgcgactggtctagttaggtgaggggcagatatgggttttggggacggagttacccgtcaagtttacgggtggcgcgggtgggactgcaacgttgtacgggttgacatatcggaaggcttgggttggtatgttgttgaattagtgttatttcaatatacggccttgttattattgtgaatctgattatcgaagtcttacgtcgttgacggctatataagcacccactattcttgtagatgtagttaggtttcttcgtagaagaactaggattactacctacaatcaatgaagttttttctaccaatccacgttatgtaacctcaatttcattgaagggattatcccgagtattcattctgtagtgtagaaacaacctcgatcttaaatgtcaaacttaacccgtgtaatgctcaaaacccgctttcatcatcctcgcatctaattaaccttgaaatatctctttgacggaaacttcaaagtttaccctcactgcacttcttgataatagcaatagccccgggagcctcgtcccaagcttcatatgtaaaattcaaagccatctgcatctgttcgacgctcccgaccgaaaacctcataggcttagcgtccaaatgcttacctgggttcatcagggccggccagaaatgtgcgttcaatttgtggacatcgttgtacaaagcgcgaatttgcgcctttagtctcccgatttccacgcgcttgtcgcaagtgatgatattggggttattgctgatagtcgacggacagaagccgagttccggcatgtgcgtcataccatccggacgtcccatgtcttccaggagcccctgcagcacctgcaacaccttgaccttgactaaagtcacggccacgagatggggcagatcaatccacctgccgcagaagatatcgacgggctcgagcggattggcgttcctgacgtccaggtacggcagggtattgttaccccagtcatagtcgtcctgctggccggtggtcgcccaccacttcaggaaatcgtagcactcctggtcctgctggaggcggatcattaggctggggatgacgtcccgcgagcccatgttgtcgcctcgggagagatacagattgtctatcaggatgttgagctgtttctggagcgactcgacatggttaacggcggtcatggtatctgaaagagcagcgcggtagcgcatgtaagggcgggtctcgtggatcttccagaaatggccgatgccgtaggtaaagatattatcggggtggtcccgtaggacccgttcttcattctccatagtaatgcgacatctgcggattgcgctacacgcggacttgtgcttccggcggtgcgcggtctggtgttcgacgctgcagtagagcatcactctgcagccggagcagcggagaactctatcatccttgccgcatacaccacagcccgaggggagtggcattttcttcctagccgctgcagaagagggggataagagcagttcggtgtaggggccggtaaagggtttccagctctgtgaatgaagaccggaatgcttagggtgtaaatgagaaagggcgcagagggaagtattgggcgatgggaaatggaggaggtgttaggttatttattctggacattctttaggagttgataatgcctgtctgccttcaaagccaggccacaatatagttaggcgataacgtaccccaccagggcaaaacacagagcaaacgcgctaatttgcaatttgatatctcaacggttgtttgaatggtgtgatccttgcaatctcatttttatattacctctcgtcagctgagtgcgtttcaggaaagttaatatcacagcgactgggtagagtggagtagaccacaatgaagcttttactatagactactctaaatgcttatccatgtcgacgagcaatgaaatcaaagcgacatatggttaagatatagtattgcatttcctgtgctctcgattttacatctgctgatatccatggatggacgtgagacatgcggcatcgttgctatccactattccaagaatagctcgcacgaagcatagacgtttaatatgaaaaccctacctagactagcatctttcccatctagccctttgacaaagtacaccaccttcgcattccttcacattccttcacttccagttcctgtgccaacgcctttggccagcagtccaaaaccttatcgcactggtttcttgccactgacagcattactgcattacttcattgtgctcacaggcgcatgtgcatacatatgcagggaaacaatagtccaaaccttgcctctaaacacacagcacccagttcaaggacgagcagaaccgatataatcacaccaacggtcacgcttcgaagaaaaaaaaaagtcgaagatcgacggatcaccctgtggcagggccgcgcaaatccaactggcggtctgaatccacgacctccccccactcctggcgtcgtcaaatcagctgacagcctcaacccaccagccacactagatcagcactagtatccgtatcggtgtgcatcggacacgttcgatgtgaaaggcggtcggacggagactgagcttattaaaccgatactgctgattaatgtgattatcaacgaggttagggctctcattggtcgcggacaggagcattgtaaagtttgtcgacgattaggtttctcagtctggagtttcgggcccgagggctgcggggagactgccgagaagtatatgcggtagacaacataacatgcggtatggacttggccaagtgaatccttgtcgtggcgatggggcaggtagtggggggatggccttagccccggtctagtgttgtagagatttcatcgtcgaatgttatatcaagagaacagtcctgggctagacttcattcctatagtagaaatgtaccagactctttaactctcatcttcataacaagcttgatcatgttctatttcttgctaggcagtgcggtggcctataacctagtcatggttatctaccggcttcatttccacaagctcagtaggttcccggggcctcgtctcgcggccgcaagcgggctgtacgagatctacttttcggtctggggtccgggcattttcgaccacgagattgacctcatgcaccggaagtttggtacgctgtgtctggtatctccggggaaagatattggatctgatactttctaggtccggttgttcgtattactcccgatgaaatccacatccaagagccttccagctattccgacggttggatcaaaggtacggaggaggtggaacctggctaccaaggacgcagcgtccatagtttccagtacaagagaccgtctatcgcccgggtgcgatctctactttgggcgaaagtcaatgatatgatcaaccccttgatcgagaaacaccatgtggatagaatgcttagcgcaaggcctcgactatttcttatctgtccttggagtaagaagaaagttcagtcaattggagaaagcgaaagtgaagacggaggagctcgttctttgcagtgttaagtttgactccaactcttggacatctcaattctccgagtcgcatccgacgtctggttggaggtggagtcgaccaattgattccattgcatagtggaagatctgagagttgagctcgcacacggttaaccccgcgagattgtggagtttggcctttcttggctctccgtcgaggcgaatggacggcagttcccaccaacggccatgtttccatccacaatccggcatataccacaattcggggtttgtcggggttaaaaaaaaacacaaagaacaagaggcaattccggaagaaggccaagaaaagatccaaaggacaacgaaagcctttttttcgagctgaacgtcttggaagagccccgcttcggcgattctgccatttttaaagaaaaaaacgccagcaagccacttggtcaattcctctccattttattctcatctcctctctgcactgcacatacatctctgcacatacatcctacacctattaaatcatcatggtatgttgccgaacttcctgactccagaacaccgaagaccctgcagatcccaagaagctaacaaacatcaacagcctcacgccgactcctcctatttcactcccggcagctccaaggccgaaatatacgaacagctcctgctgtccacacaaggtctcctagacggccaacggaattgggttaggtgagtcagctccaacaaccctcgaaaccttgcaacctctaacaaccaacagcaacctctccaacgtcgcctccctcctctggcacgcctacggctccctcccagccccctcctcagccgtcaactgggccggcttctacatccgcgacgacaaattccccgccctcgcctcgcccgtctcctcgccgcccttaccaggcgcacccgggtacggcggcgtcatcatctcaactacatactcctgctcgggcgaccagatcctgctcctcgggccgttccagggaaagcccgcgtgccaggagatcaagttcgggaagggcgtttgcggcacggcggctgcgaagcaggagactgttatcgtgcctgatgtgctgactttcccggggcatattgcgtgcgatgcggagagtcggagtgagattgtggtgccgattttggtgaatggtgaggttagtactttttccacttcctggtggggttgggcacaagcgggttttgggcaataatatatatactaacgttctcattttagacggtcgctattattgatatcgactgcactgagccttctgggtttgatgatgtggataaggagtacttggagaaattggcggctttgctggctgagcactgcgattggtaaaagttaacataatttggtttttataatggttacgacagatacggacttgggtgaatgatattgtacgttttatgatcgtgatttcttcctacgtagattctgcaacatgctctgctgtagtttactccttcctttaaaatgtacggagttgatatcttccgtgtatctttacattgacagtatggaatagggattgaaagtcctgctgtattgtattgtatgcgcaagtttattcgtcgcgaggattgaaaatgtaatgcaaaccagcaagccgaaatataaaacgatactcgacctgctcgagatatgtcggaaacaatagatacaatgcagaccaaacaccgagcgaactcatcacgctgggtggagaaatgaaaagagaaaacgccaagaccgagacggtaagaaggtatagagcacaaggaaatcgaaaatcgctaacatgcacaagaacatcacatattgagcaagctcatttgccgacgcatgggactcggcgacagagcatccccgtcttcgctgggaccgatgccgctgtctggaccagcaagcacggtgtccatgtcgatgtcccactgttcgtcttcattgggatcagtgttcacttccgcctcggcttcgccgccatcccagctcttctggaccgcgccgcgcgtgttccagcgcagagcacgctggacgctgatgaaccactcgttgttgttggacacgacggtcgggaatgggtactggctggcttcgacagtgacgtagtcgccctggcggagttcgacacggcccttgccgtcaaaggagcagtaagcggtggatcgggaggatttagggacggcaatgcggagaaggtgggagtcggagagaaccattgggcggaaggagagggtgtgtgggcatattggggtgagaaggatgcccgggatggatggatgcataagagatccgccggcggacagagaatatgccgtggaaccagtcggcgtcgagaagatacagccgtctgcttggacgactgttagcagctcgtcgtcggcgtagagctccaggttcgacacgtagggggacgggccgcggtcgatgacgagctcgttcagtacttcgaattgctcgccctcttcgacagcgcccagctctgctcccttgctccggtctttccgatatacggtgcatgtgaaccgcatgcgcagattgacgcgcatacccacctcgcccataacggcattgagctgcgatttgtaatcggcaaactcgaaatttgtgaggaagcccaggctgcccagcgaaaagcagagcacgggcggaaccacgcgctggaagagccacgatgtgaaaagaacggtaccatcaccaccaagggtcagcaccaagtcgaacttatcgggcgatgtccagcacagatccggtgtccagaaatgtaacatctgcgcaaacatcgggtctttctgcaacagccccggggcatcaaatcgcttcgaattgcgcagcttcgcatctacatagacattgactcctagttcacttccgtatcttgcggtcgaaagtagccactccgcaacttcccgggtcaagagcaccaggctgttatcacgcgccttagtaacaatcatgacatttcgcaccgctcgcttgataggtcgtcgctgtagttgcttcgacacttcacgaacaccagtcgctgtctgaaccagtcgcgaatgcgacagccactcgtcgtcggcgatttcctccaacaccttttttatgttgacagcatcatcgaagcgttggtgaaaataacatggcgattgcagtatcagacgcgccgcggcaggtgaacgatcgagatatccgctcaattgaaaattcgatagcgcagtcgagatgttctggggggagtcattgctcccccgccgtggtcggttctccgaaggcggggaagtctgagcggatttattcgcgagcatactcgacacagaaccggacatatcggtattattggtgataatcgtagcccgcgaggccagggctttcaaaattgtctgtcgcggtatgcagtcggtggacaacgctttcttcgatcgccggctagtcgacttccgaaactgctgtagtgttgagtaaggcagcgacaaggcggcttcctgaaccgattcggatacgtgtataggtagcacgttgtcgggtccagggagatctggcttggtctgggacaaggattctatgctgagggcatctcggaggagcgccggtctgggtggggacgatagagaggggggagacgttcgcgctgtagacagactcgggagtgtgtcagaccgtagatgatcacggctggacgccatcggcttatgcggcaggtaaataagatgggataatcaggaaaagtgctcggatgtaacggggtttgcggatccgaagtcttgagatgctgtcccccgtcagtcgtggacccaggtattgcttctagcgtattccacactcttttttgggttttttcaggggggattccttttcttatttggtataataacgacaaggatgatggactggagtgggttgggattagggtagagattgacaagaattgggattggcaaggcacatccaagaaaaatgggattcctgtttaggaagaccacggacctcgatcatcacattaaaacacgagattatttagattgcttcctgcgattcccagattccccagataatcctctcactggcgagtctactagtcatcgccaaatccgtacaggcgcgcagtgcgcgcagataatgacgtttacactgtcatatcaatctatcggcaataggaggctcgttaggatgctcatagatcatgataggtattttatttctttggatcttccattctccgtgctactttgtgcattctttgccagaatgtcggttaaacatgtattcctcaaccccgactcgaagtgggcatagccatcattctgactgcgcctgggagtctgtggttctgtcaccgctaaatcacttggcaagtgagtgaccaaacgtcatcaaaagcagacagggtccggaatccaacaattgaggaacccgagaacaagcctcacgcaaggctgtcgcctgtggcagtgaatgaagcgtgttgtacatgcagcggcagtcaggtgacggtgccttaaccgggtggtactctatccactgttttgtggcaccgtcgtatcctagtcgagaggggcgatatagcgagtgctgggaagtcatgtgcacaagagaaggggcccaggggtgaccgcgaccttacacacgtctcactaactctccgcaaatttgccgggcgcaatccacctcagatagaatccagcttgtaggcgtagtcgctgtagatctggtcctccacggtctcccggatgaaaccgctcacactggcgctggccgttccttcacccatggcaacgtcgccatcagcgctggcggtggtctcgccctggcaaatggagagcgcgcgctcacggacatattcccaggtatcaaatccaaaccgaccctcgctttcgttgaggagaaggtggttcttcgaggagaaggcaaaaacgtggagggacacagcagccttggcggcagtcggagaggggtcccgcacaatatcaccatcctcagttacaccaaggagggtcgcggagaaagtcatcgacagaggaaccgaggcggagatcatagcgagcaagccagtatgtaggagagccgggaggatagtaaggtactagatagatcagtctgacagttcaacaagcagggcgaatggaatctgagatactcacattgtcaccgcgtgccacgttctctcctccaacaatagccagagtaatgaccacgccgcgacggggaaagcccttctcccgtccaaggacgattttccctagcacagaccgcaggattccttcgatatatctttcaccgacgccaccagttgtcgtaccaggtttgacaaagacctccacagtggcttcctcgggcttcaatgcgtcacggcgtgctgggagctcaatgggcccgttgacagcgcccagaatgctgtaaccggtggctgggcatttgtatgacgccgaaccatcggaacgatgtaattgtgagagggatgctatcggaccgaccatattgacgatggacagatagaaagatagaaaattaggaagccaaagttgtgtttgaagagcaaagtagcaaagttgttctgccactgcgatttttcatgtgcgggccgcttcttgattggccgccttagctgcgattgtacttggtactttgtttgtcgctggaccatgatatatttctgaggtatcgactactttgaggtgtcaactaaattgttgctttctttcccttatccctactattcttactattcacctccagactacagatccatttgatccgtcaagtggtctgagacttattggagtttcaatcaacctctcgaagataaccatgtcttctcatacgagcacttactactgtccaccatgacaaccaaatatgtgctgtgggtaaaccaacggaaattgctcttcatgttctagcttcgtgcttttgatttttgaaagacattgtgagcaaaaggcaacttcaatcgcatacagaatatccattgattctgccatcacaaggatgaccgttgtctatacaattcacaacatagaatcagaggtacaccattattcctcatctcgatattgatgaaacagaaaaccaaacccacgagacacggccgatcggatggcgggcaaggactttgcgtgctatgcatagtatacaagatacctctggccgatgatgagtcttgaatatccccgcgaagtcctgcgtaaccaggcctacgatttgagggcctcgccttgatatcgttttagcagaactactcatttgatccccgtacagtcttaaggagctcatctgacccattcccattcggagtgtccctattacttcccaggctccagagcatccacctccctttctaccattgggcagttgttagttccttctcgattgccaggatctggtaagaattgtaggctcctgatccttccaggatgtattcgtgatgaacctgtagccaccgcgtagaatttgggccagtagaccgtccatatcctcctgtttttgcgcctcggaggtaggttccgaccccttcctgggtgatactttgtcgggcagcctcctgacggatcgcctctttctcaaatttctcgagatgaatctataagggtccgtttgtcagatgtaatttgtactggaggtcgaaccggtacgcctgattgcgagctcgctcctcctcttcgcgtgcggaccgaggcagtagccgtgagcgtttgatgtgcttatggacctttcctttaggtgagatcgatggagttggtccctctatatcaggatgaaccgatccggcgcgatagcaaccgatcctgtctcattacggaaaatggtgtcaatgatttacctgctctcaaaagggctgatgttggtattgctatgcgcaaaatagaggctgccggtatggttttgacgatctgagataccaaatccttctcggtcttccacctcctatgcattgggaggggccttactctagaggatgctgagatgcgggcaagattggtaattcttaagcgtctatcacttagtactaacgcgagcatggaactgaagtgatctaggaatattttggctaactatctaacaccaagttggtcatgaattgctacctgtaaggcgttcaacgtgctcttcttattcattcattttctcgtctatatctatttttccagcatgaaatcatttcatatatctttaactagcatgtagtttcgccggggcttaatatgtcataccctaaaatgaaatgaacatggcaataaatctaatgacatctgagaagtctttaggcagtccacgttcaatgtcaactactaagcaggtcatcgtgctaggcacctacatagccccggagtgcgtgtccatttatagcttgccaatgatttactgatcaacctattcttactctcgaatcccagtccgtctatcccgtcaaggacaccaattatctctccaggtatcagacaaggctacgtatgttttatgtctccacgcatgttttttccctaaacctaatgcagacacagtaatccaattggccatcggcctgacctcggggagctaccccagttgccgatgtcaatatcaactatcaacctggagtggggtaaagaccgttatgaagaatttacgtttagtcaacgttaaatgatcagttttgatctgcttcccgagatgtgtttgaacaaaggttcgatttagaatcatcgcaattggtttggaactagtctgagctggcaagagaacagttggaagtgggatttgatgcgaggatgctaggggccccctgtacgaaacgcaggaggatggctcgattggtaattagatttgagataacgaaggaggggcaggtgacaagtgggcaattcaaggctgttttaggaagattctacattgacaatgtcaatttcaactaatgttaatgggaacatacgacttggatgcagggataaatcaaactcgattcaacaatgtgggaataataaccatggcttcgtgtttctctaatcatccggtagacatctagtagtgtcttattcaaggggtctcggagacattgtagaccagcttctcgccgctgaccttgccctccttgagcagctttagaccctcgatcacacccttcagtccatgctcgccgaccttggtggggtgggccttaatctttccttgggcgagcagatcctcgacaatgggaatgaacttctcagcgtgagccttgtcctccggcttggcagggatgggcgtatcaccgaaagagaatgcctcgccgatagtggtataagccagggtgtagcggtcgttcacattggcacggttaatcttgacgctcagcaaagagctgtactcgccgccatcggtagagatagcattgtcgcaaaacgcagcgctggagtcgagcgagatacagtcaaacacgagcttcaggttgttatcagtatccttgcgaattttagcgggggcttgcgggtccttgtagtcatagacatcatcggcgcctaggctgcggaccaaatcgaagtggtgcggcgagcaagtggtcaggaccttgtagcccgacagcttggcaaactggatagccagggtaccggtcgcggtggagccgccgtagatcagaatgggagtggcatccttgatggggtcggtgggaagggcaagcttcagactctggtacaggccctggcccacggtgttgatgcccacaccgagggtggcggcctcttggaagctgatattctcgggtatcttccactgcaagtcgcccttggcgacgatgtactcggcgaaagtgccgtcctcgggctgcactgcattggagccgtgcacgaagccacatacgcggtcaccctttttgaaatcctttttgacatccttgcccacggcctcaacggtgcctgaatagtcgcatccgacgagaacaccgggaggagaaaggtaggcaacgtgcttccagtcggtggggttcaagcccacactgacggtcttgacgagtagatagtcatcgcgaagcttggggatgggtcgatcagtgaccagaccctcggtcttgggctgagcgatgatgactgccttcatgatgggtagttgattgcggagcgaagcgaagcaattatatagaatgcagttgagaagagggaatttggagaattgggaggatatagagtgtgtgttagttaaatagtgctctgattataaatgctctgattacaaacctgaagtatgacgaaaggcaatcactgatcgtcacaaatattgtaccgactccgtctcagtctatccgccatcctctctacacagcccttggtgaacagcgttgcccctggaacagttcattgttttattgttgtgccacacatgccagatcaagacgctacacagcttttacgggagaacccccatgaaattgggcatctttcgattcaggcctttgatactctgccttggttcagtctcttgaccggtcttcgatattgcacagggatcattgacatgaacacgagtcgtgcagccaagattggacgcattcagggtgttcatattgcgtcatccattccctaaaacgaaggatggctttggcatatatgaaagaaacatgtatataccgtagcccaatggtctattcttgatagaggaatggtcgactttttaatataatatttgcaccaataggcacattcaacgagcttgctatcaaaatcggttaactgcaatccgatttaggaatcaagtgccagaaagacatataccaggcattgatagatgaagcagaccgagagacaaactaccagccgatgaagaccatatcttccagtctctcgagattttatattgagatgtctgacgccagtataagtatgaggtaatgaggttcgctagctagcgcaaggggtatcagccaagaccacgagcaaaaacagggttcacgcaatttgagaaaaaccatcagacgtatatatagctattcgagtccaaaccaacggattcgccgtcttcgaatctccattcaggacaagacgtcgggggttgggatatcgcggggtcagaccgtcaaagtcggttagtgtacgttagtgcttatctgcatagacgacccctcctcgacagaattcctcccagacttctatttcaacttcaagaagaagacaatcatgaaggttctctgtctccacggaaaagggaccagtggcgctatcttccgctcccagatctgttagctcccccgcagtcccaaaccaactctccaactaaccgcgcccagccacgttccgctccaaactccccaatgacatccaatttgatttcatcgatggcccatttaagagtgacccggcggcaggcatagatatcttctacagtccgccgtactactccttctgggaaaatgatagcgtcgaatccgtccgagcctcctacaactggctgactgagcacatcgccaagaacggcccatacgatctagcgctcatgttctcgcagggctgcgtgctaggctccagtgctctcctcttccaccaggaagaaacaccgcatctcccgccccccccccaccccgcggggggggttnnnnnnnnnnnnnnnnnnnnnnnnnnnnnnnnnnnnnnnnnnnnnnnnnnnnnnnnnnnnnnnnnnnnnnnnnnnnnnnnnnnnnnnnnnnnnnnnnnnnnnnnnnnnnnnnnnnnnnnnnnnnnnnnnnnnnnnnnnnnnnnnnnnnnnnnnnnnnnnnnnnnnnnnnnnnnnnnnnnnnnnnnccccccgccctttgaaggggggggtttttatctgcggtggcgcctcgttgagcgtgctggaggagatgggcttccatgtttcggccgaggcgcgcgatcgggatcttgcatcccgggctgcgctggctcaacaggcgggctcgtcggcgctcttggctcagggtgcggatcgctggactgggcttcagacggtaaacggcgggctctcggaggatgaagtgcggaaggagattactagtccctaccgcattaatattcccacggtgcatatttacggctcgaaggatccgcgctgggcggctggtgtgcacctttccggtatctgcgaaccgacgaaacgtcgcacctatgatcatggtggtggacatgaaattcctcggacggctgctgtgagtaactcgatcgcggaacttttcaagtgggctgctgcacaaagtgaaagtggaattcagtgaggagtgaattatattatgtcacactttatttttttcaatagatgagatagattataagtggaaatgtaaagttcggcaaattgtattctctcgagaggtagcgtgggcttgaactaagatatgagagggcagagagatcgacaagacccaatatttggctccacttgccagccttggtattcccttgcctcgtgtatatatgtactcatcatatccatctccaacactccctattaatagattcaactcgatcggtaagagatttccaaggttagccctaattcagccacgctagccaattccggcccactcgaaatttcaccctctgcccatattccgcaaaagaaaacgaattgccaatatccatcatgtcatgggatgaaacgctcaagctcacgcaggccgatgagtccgaggagttcaagttgttcgaggcggttgtcaacggggatgtcacggtcgaggatgccgtgcaatgggtcatcaccacgacaatggacagactggaagactacgggccgggaggaagcatcgagaaagccgacgccgtaacgttcatagctatcatcgagctggctatgcaaatcgatacaacccagtatggaccgctggttgagttcctgggagaattgaagctgtacaacgccgttgattcgtcaacgggcttgatcctaaaaacacaagatggaagcagagtctggtcacatctgccgtcgctgaacttctgggtcgccgaaatatggacagaccggatgacacgtaagcgaaagcgaaagcgaaactgtttctgtacttttcttctgtagtgctgacctgtcgattcgcagaaatctgtgacccggatatggaacccgatcagcagatcagatgggcgaagctcaatatcttcctcgcgcaagtgacgcaggcggctgaggttgagtatacttccctgcaggtgtcgatcagcgatgctatggatgtatcgcacatggcactctgtggactgcgtcatgtgttcgaagagcgcattccttctgaacatattgcctcgacggcgggtctgctcggtgtgtgctactggctaatctgtgccggtgatagactctgggagaatgtactcaacggccgcaaatacaacagatatgatggtcgaccgggagaattgtattcagatcgcgggtggaagggctttgaacgcgaaagatgggatatatgggtgcagggtcttcgtgacgcgaaggccgcttgcagaccgggcaaggaactcgtggaagatttgatagaccgggctctgtccaaaatagagcgtgtaatgagtaatgaaataccatctaaataagcatttacaaactactacgttgtaataatttacacgtcggtttcgaaaacaaacattcaaaccggtttatgaccgactcttaaacctcacagggtattgattagagttcaaacattatatatagaaagacgccaaacacaagctatctagaaacacaagtcactaccatgaaaaagtctcttcaaacagatcaaccgtcttctccccttgtacattcctaacagcctcccgcacactatcacccaggccaccaggaccgcaaacgctaaccgccatcgcaccgatctggtcttctttttctttctctagcacggattgcatacacggcttaccgtggtggatgctgaccggcacgccaggcggagcacattgcatccacagcgaatctggctgagggacatattcctcgacagcatccttgtgtgatgtgatgtggaggctgatggacaggaggaggcgtgggaattggaagaaggagtgcccgttcgagtttattgggcttagggattcgtgccctagtatttcggccatgaatgtttggatccatgtgagatggtctttccatatgttagtgggcgattatttatgtggaacaggtgggcctgatcataccgagactgcggacgatccagactagatgcactttgcgggtagctgtcttttgctccgtgaacgtggcgataacttcattcaaatatgacatcgggtgggtaataccgattcctccggctatcaataggagagtaccgtatgaggtgagagaatggataccacctgtgagatgttaaacatgtttcaaatatcaacaaccaatgggtaggaatccataccaaatggcccctccgccaacgccatagcctgaatccgtccctccgcggaggcttctgccttctggagcaactttttcgtgaatccgtcttgacccttgattagaacagacatggttgtcgtcgccgaggctccagtaagagcatccatagagccacccgagccgcgcttctcgttcgtattcaacgaacccgttgacgaccacgcaaccgtaaagggatgcgaagtccacaagcccagacacggcatgtagaggtacatatactgcccaggccggaaacgccatgcgcgagccacggccacatcaacacgagcaactgacccagacagaacctcgacggtagcagttgtaggacgcgagctgagatttctccaaagcaatatcccaagtcgacctgcacgatccagaccccacaggatcaaggtgcaaagcagcacacgctgttgcagtaggttttgcaggtgataccagagcgccacgaaggaaaatacagccagggctatgtgcaggtgaagaaatagttcgtaaaaagcatgtcgggccggcgacagagattgaacgaaaataaaaaggaatccaatgatggcctacggagatatatgttagatggccatgtgaagtgctggtgggctgcatcacataccagaaggccgcatataaaaagcttcttctgccaaataacatatagaacatagtccgtgccatctgagttcaaggtttcatgttagcgaatgatagccgtatatgtgcaaggccactcacgtgtagaagccttgtcagccaacacggcgctcatgtggatgacggcgttggctgtgatcacccgtcccacccaacgatgcatgaaattaaacgtatcgaacgagatccccaacagctggactaaaggattgttgcgtcctgcgcctaggaccaagcccggcgtattcatgacggccagatggcccgcggcgtacttaagctggaacatcttcttggagtaatcactgagccaccaatcgactgtcacaagaatgaagattatgttcaagctgatatagatcagcaagcaaatcacttccaatcgtagcggaagagatcccatatgaagcctcaagaagcggaattcgcgactatggcgattgccccatatcggggcatacagcagatgccttttcagggccgccttgaaccgacttgtccggcacagctgtgtctggtcgcttccttgccgtgcagcctttgatcgtcgacgatggctgatgcgaatgacagtcttccagacgaataaaaaagctatcagtccgccgacaacaaacagagggaccgcaatcgtggggttcataggcggctccccccggccatttcctttgagttccacacccatcgtgccattaaacaggcaaggggagctcaaggtcaggtccacaggcacagggatcgtcgatcgtcaaccacaatgaacagagttttaaccctcaaggattcaagaccaagaaagggaggacacaaggtttaaacgggatagtgttataaaggatactcgggtcgcgtggggaaaaaggaagacgtgggcatcattggcgttgtattagtttccataccagctatagacacatgccgtcattgaccgctggaggccccgcaagtttattttctgtgaagacggacgaacccaccctcacgtttacaaggcaagcgtagacaattgtctcacatggccagtgtaacgtcgaaacgggcgaaacggatcttggcaacgctaattctattctgagtggagatgatggacgaggctgagtggtgaggaattccaaatatcagggaagtgccctgtcatgaccaaatcgaagggcatgtggacctcgacatagtgtggcggactgtgtaatctttgcatgtttgggtgttctaagaacacggggataggcgtggagacggagccgctactgttcggcaatccggaaacggaatgttgatacctgcactgctgtcactttcagcattcctcgtcccaatcagtcatgagataggaacaaagagatgagaaattcaaaactaaccattttggttcctagagagagttaatttcgcttgatctttgtagagcaattgtctgaatcctcaatagcaagatgcttaacgtagactcgaaccccggacactcggtccagtgggatgcaactgcaacattagagacaatggtcaagttagaggaagctgtagcgtagtagtcttggaaccttatatatatgacgccatagtacactatggtcagacttgcaggcgcaaagacttctgaattggttcaagagattctaggtagaggtccgtgtgtttagaatgacaccagatggacaattaccaaacgacttctttcggcctccatgcccagtcagtgagctccattaagccaagtctcgcaagcatcgctaagcattccgcttcagggtaagttgacggtcgtagcggggctgccccaggaaaactgagtatgtcacgatgtgtaagagaaaggaacatgatcatgatcatgatcttcacggaatatttcagatgagtcaaagttcagtacctagtggcgtgactacagagtccagactacaggtcaggagtcaggaggtccacggcaatgagattggtggccttggcgtcctggcgaataaagttgatgccttacattccagtttcgttgcatactacttagtgcactgtttccagcactcaaatgatgaggcttatctctctaatgtactattaaaccaccgaagctgatacaggcaaagggcgacgggcgaagttggtaattgtcttttctacttctgttacatcctgaggtcctcaggtctagattgctccaaacatatataaataccacatagtacataccaaaacgggataactaaacggtgtgataccggaatcatcagatcccttgagctgtgacctctatggtggctatggcatgccgacaatggattgttgcatgtcagaaaggagacaaattggaaacatacgcaaatctcgctgttcttgtagagccatcccctgtaaaaactgattcctgagaacaggctgaatgcagaattgttctattaggagcctaggctctatagaccagagatcttctattcatacagcacaaatggattcattcaaatatcaattatcaactatgttatgataatgccattctagttggcgctagagcctgtacaaatacgctatttctggggttattccattccccctttttctcatgaccaaaaggccttgaccataaccaattagaaatacaaaaaccgaaaacgccgtcattattgggtttgcataagtgacaccacacccgtcctaggatcattagacatctcagctggggacctcctgtacattggaaggggcatgaggtattggccttccatcttcttcaacagagaggctgccatacccagtgtcgttgctagctgatcgtgcccggcggagaggcggtctttcgacaggatagtcaatcaggtcttgatcggcgtcgctttcggatgactgagattctcccttgcgacgacgggtcctgcgtttcttagacatagccctgtcaggtgcggtgtgcacaaaatcttcaacattgatgcctgcattttggcagattgctgtgcacgagttgacaatcacctcgacgagagtagatgaaaagccgtagaaagccggggtgtaggcatttcgggcccaatatatgagctctgctgatacccgcccgagattgggaatgtcacgggggcagagggagagcttttgattcggacggggtttttcttcggcttcgtcgtctgcggaagagatagccgcctccgaggctggagccgaaggggatgaatcggatgacgcaatgtaatccacgtcagaggcgaggaggtgtaggagatgatagacagacgagaaaccgatgagagaaagctcgactggatcaatcggaagctgattgaaccaagacacggccttctccatggtgaaggagtcaggtagtgaggagacaccacctgtggatcgttcggtgacaatggtggcaatcatagcacagcgcacggcgatggagatttcatcccgcacggaaacgggcagagaggaatcaaggaagttggatgaatggctgtgacttccctttctcttctctttcggtagcgcggcaagaaccgccccaacattttcaatgcggttgtgctcgaagaaaacggctttcatcacgagtgcccgagtatgcgcggcggaaagcaccggcgccacatcaagggacatccgaatcttctctttgaatgcatcacggcttgccttggacaccgggcctttcccgcttgcttcgaaatagttgagaagagcggtttggagaagatgactggaccaccaagctgcaagtgcatcttgggaacattgaatagctgggtcctcatccacaacatcaagcagcacttcgtcatcgccagtaccctcctgggttggtcgattccaggtcaggttcacagcacgctggataatgttgtcaatcatgacatcctcgcaatccagtttgatcagggcagcaagatgagggggaagctgatcagggtgaccctcgggcagtgcggaattgatttctcgagccacaccccactggaatctggcaagagctcgcgcaatgtcgtttgacacatggaatgaccaggagcccgcctctccgacgttccacaagagaatgcggacatgcaaggcctttattatcattcttgcgggagtacaagggagtgtgccggcagcgaagatagtgagcacaaggcggctcttgctgatctcagcatctccaccagtgagttgagcatcaattgcgatatcccaagtcttgactcgtcccttctcatcctcctcggtgattccggtggcccatgagtagactttccatcccatgaagcatcgtaagacgtattcgaagcatctcgaagtaacaacataccactctcggaagaatctatgacgtggaacaccgacccgttgcatgctagtcagccaagcctgccgacggaaatcactagatgtaagaggcgcagccgggccctcagtagccaatttggatgggccgcgtcgggtgattggctgcgcattgaacaagtagacaaaaacgataaaggcactcccaacgaccagcgttgccagaatgaggaaatgcgaaaatgcacgtgcctgccacgagtaccagaactgcttcaggtagaattcacaatgtgccagtgtgggggtttggaaacggccgagaagactgatggggagtgaaaacaggcccttcgactcggactcggaatcgtcagagcccataccttcaagaaccatcagaccggcaagagcacccagcatatatttgttgggcatccttgaacgtcgagtggaggtatcttctctcgcatactgcggttgatgagatgaggatgatgacgaggggtacttgatgtatgattcagcaaagacaccttgctttgccgtttcagctcgcatacgtttccacgcatcgggaaccggaaggaggccttctggggggttcggagaggtgggtgaactctcgctggacacatcttccgcctgagaaaagacactaggtgatgtaccggagttcgagtccgtcgaggcgtagttgctgggcgaggacacagagcctgaggatgtggcggcctgatctgctactttatcagcctggcggagtcggttcttcaagtcggtgttttcgtcttccaagcgttggttacgaatttccagatgtttgatgtactccgtcgctttcgacaaaatggatgctttgttgagcttgttggcagcatttgctccctccgcttcgtcgtcatcatcggctgagcctccattcggattcttgggcgaccgcaggctgggaacactgtcgcgaagttcggcgattttatcgttcaaattggcgcgataccgcttctcaataacgttgtgagctcgcttcttggcgggcattttcttgcccggctgcactggtccagtcactgtggtggcatcgtcatcgctgcccgtctttcgcttccggcttgtgccaacactggagattggagacaccagaccgtaaggttgctgctggctcgtacgatttggtccaggcaggcgatgggtgtacccaacgttgttcccggcattgggctcggatgggatttccatcaagccgagtggaaggttaggcgagaagtccccgtagttcaaatgacttggggagctcatatctgtctgcggggagatggatggtagatctatagatgaggccattggcttttgatctccttccgagaacattggttcatcccatcgcatccactgggtccaatcctggttcacattctctccgacgggatgtgtgaacaaatgaccatttcctcgtgtctcatccccaccagggtttcgtgaagaaaatagctgaaagtcattctccatattaggaccggacatcttggacggctgggtcctcggccaatgtctaagtccgaatgagtattgggcagtctagatagttgtcactgataaacatgttagtttcagtaatacagaaaagccacagctcctttaagagaacagaatctagctgcctgcacagccataggcaagcagaaagctaggccgagacaggctagcggcgatccctgagagcattaaggaggtagatagatgatactgactgggttcaacttcaagtgtaacgctcgaactcaaatgcacgaagcttaatagacgtgaacgtactccgtgctttctgcaaggtgagatgtaaagactgagttgcgaggagggggatgtgagtgtaacagtcacgggcggtgctaggcgattggaggagcagaaagcaggggtggaagatacccacatacagacgtaaagtacttagggcccaaggaagcaagtggattcccaaattcgttggcgtcaaggtgatctccaagagaaggtggatctcatgcgccttgagaaatacgagaaacaacgtaatgggaagagacagccctagagatacaagctattgcttcaaactgtgattaaactgccagagtccccatgcatgaagatcaggggaggttgaatggccaggcagccggggaaggcagtttcgtcgtatgatcgcggctgaccgcacttccggtcacccctgacggtatcccgggcgttaattacgctgagtcatgatattttgtgcgtgtaacaatgtaatttgtgttttgtgacagtaaccaaaagtcaattatcattggtcatcaatatccccactttgcctcctcctgcaggtgcccaagaacgtttcgagcttcaacttcttctcttctttagatttctttgtctactgcgttgtatcttcttcctaaccttttagattcacttgctgaaacaaagcgagccgcatttctcgttttcctcgcactcgaatcggctgaatacgtccgcgcgtgatgtcttggcgccccgcgggtaggcgacacgggaaaaaatgggcgtgttatgatcttatctgatcgtgctagtctccactcctgcctcgtcggcagcgccggaaccagagcaacggcgcaagaggcgaatggaatcaacaatactcgtactccgtacaatataggctatgtggatctgaatccggtatcgcagtccacatttattcacttcgacagaagcacatggctctcgcgaccaatttctggaaagctaaatgaaaatctctgtctgatgcttcggacaatatgcatcccgcgtcaaattccattgaaccgccgactgatctcattattaccacaataagctgaaatatgttgactgggtaccatccgggcaagagattgtacttgatcatcccctcaccgactccttcaatacgtcaccgacctcctcgtatggagcacccggcttgagcctctctagcgcattccccactgtgtattttatcaatgcagagcacagatttgatacataactcactgatactatatctaagttagcacgtggtcatttgttacaaccaataataaaacgggttgcatggagcctagatcggttgtgcgggcccgattatgagctgccaagctgagatgagacttgtgttcacaagggtcgcctttcatagagttgagagctcgttggtgggaccccgtttgtattgggtggaagttatagccgttccttcagaaaaacctggctggattgttagagttacattttcaacaatttggccgacatcggcgatgaggtcgccatagggatcctcgatgtcacctttgagaacaaagccacaactgcttcacgtcgaaaactttcatggagttccggggatcaaatatggctaagagtcctttgaagacattatagctaaggccaggctctttcgcggtctttgggggtatttgtactgttttctttatgaaacaaggtgagcgatttgtctcaagttttcatatattctacctagatgcgcaagtaatgtcggggctcttggtatttgttcttcactcagaatctcgtaccgttcttctcgactgcctagtccccatgaagcctatcatttttgattcagacttctggccgactcttgagagctctttagcgaacgagccgggtcctctctgtagtatgcaggatatttggggatggttgggctcaggaaattgaattgagtggtagaaaagatgcctctgagatttcaaaggatgaaagagaaggtgtaacgtatagagtgatgggatactatagatttgatcggtattactaccatgaacaaaatatgctaaagagcactccatttgtggggcattatacccttctccaccttaatggatcgacgtctgtgctgccgagaaaggatgaaaaaacacatttgataggttggcattcaggtgaagagaggggagaaaataagaaaatcgcaaagtggagggggaaggcagagaaactttgtcttctcgaaacctgccggtaccgatgagttttgcatagcattcaaaataggactgcaagataatcttccttcaggttcccagctggattggtgtctcatcaattcagttgcacgtgttccaaggcccagagagttctcaacggggtcaataacatggggaggcgactgagaatagggaccaatctgaatacttcacgagaaagaaagtggtagacaggctgaggactttatggcatcactggtgtacaaacatacgcgacgacaaaacatcaacaacagtatcctcttctccaacctcgtgccactggctcaaggattgatgaaaagaaaatattctccacgaatggaggtgccaaataatacgtctgccgataacacgagtgccattgaacaaactgttccgccgcgtggtgcaatgcagggaccagcctgtggtgaactgtcatattgatcacagtcacccaaacatggtacgatgaagaagaaagaaaaaaaaaatgagaatacgcggggaggggctcgctatataccatttaccagaggactgcgccacaatagaatgtttgttccttttgtatcacacgcctcgattatccttagggattcctaagccacagagtactgccgtgcatttgtgaaaattctaaagcaggttagttgagcggtacggcccgccccgtcgatgtgaaaaccttatatctccgtgttacagtagaagtcaccaacgaatttggaaattgaggctagataggcgcagaagagcagagaatgatatgtctcctaattgtattgaacaaagtatgacttatgccgttgccgattgacgacgtgagacggcgaggactatacatcatcatcatcttccccagagctttgcttacacacttgagatacaaagcctgtgaattatgatggaaatataccatggtctatccaacacaactgagatctggtatcctactcgtgaccccaccggctcatcaaaggacagcagctgatagggccagtggaacttgttactctcatgcttttttaccaagcgcaaagcccctagagagaccagcttcgacacatgttcagggctctcgattaagtgtgcaagatctctacgaaccctgcctgtgctgctcacatccctatttctccacctcaggggaatccatggagtctcggaaccatgaaatccatctaccgtcatattctctacttcgaaccagcgatccttcctattgtaccagaccaccgacactgcaatcgttacgcgacgagtaactactgagacaatgctcgcctgaaaggaaaggccttccgtcgttgcttggctctaatcgagcgatgcacaaatgatgtcgaaattgcactatgtatacagtgaagggatttctgtttcatgtcacatttgagaaggagaatatggcagtcatagtctcatttgtcagttgctcgtgatgagaggatcagcctggtggctgatcacccagaacggatataatgcaacttggccgaatacatcgtgcggggggatataaagagatagactccatatcggtgtctggccgatgatcaggccaccaaggtcctaccggatttcagtccgttcaaatataggaaggaatgtcttaaaatgagtaccttgcgatttgctactgttacttgtctcaatcacttcaagtcaaacactctttcataatttatttcttaaatatagattcatgctttatgatcttgcgagagagcactctatgataatgtgcatacatgcacatatcacactaaccaaattactaactaaaagagcaataccgagactgaaatgagctcaaccttcaatctcgactaggcagcacgatgcaaatttagtgctgcagggatggtcagtaacgagtctacaatgtgctagagacaatcaacttaccgagatatcttcccatttctcccagccacgcccacgaacctgagccagttcttcatccgttagctgcttgccggtagtgaagtatcctgattggatcttggcatcgatctcgactcttgaatcactagggatcatctcatcggggatagggatgcgctcgataatattgatgccggagttcacgatggcgtcgtacttcatgttggacattgacagcatgcgatcgatcttagtgatgccgagccagtgcagaatgtcgggcataagagcttggaatcgcatctgcaggggatgaggtcagtatatgcgagtcacgtggaatgatgaggatacttacatcgcggacaccggcaatattctctgtccgagtgaaatacttatcggcggtgtcgccaccacgcttgcgcgcattgtacacaagatacttaataacttctccaagggctcgaccttccttgcggaagtagatgaccacaccactgccgccgttctgtgcctctcggattgcttcgcgaataccgaacgctaagtatggtcggcaggtacagatatctgactggaagacatcactaccattacattcatcgtggacgcgcagagccagtttgacattagggtccgcgatccgctctggtgggccgaagatgtacacggtaaggcctccgattggtggcaggaatgttttcagatcaggccgagtgataagctcagggtagctgccaccggtatgttcgaacaaagtccgacgaagagtgccttcatcgacgccaaatcgctctgccacaccgggaagataccagacaggctcggctgctactttagtgacacgcacctcgccggatgaatcaaccaagacagacccgtccacctcgagcaggccattcttgacgtcatcggcaatctccgcgagtttcatgttcgcccgagtgactgccatcgttggacggatatcccagccagcctccagctcttccttgaactggttgacaatgtcatgaccgtaaggatccatagagacgatctttttcttatccgcccaggcaggctgcggggggaaattgaaagtcggctgagaattacggaaatccggtcggaaatccgcatccaagtcaccagcggcaatggcaagggcattgtatacgctgtaactgccaccgtgggcgccgatggcattgcggcgcttgacgaggtttccactgcgggatacaactaccggaccccgggatttggcgtcgggagcgccccactccagagggacgggctcaatgccgctctggcctgggtacgtggtcaactatacttgatatcagcatcatccgaagacattgaagtcagcccagatctgatctttcttacgataatatggttgctgtatcggggattggggtcggcgggggctgcggaggctgcgggagctgcgggagctgtagatggttccatttgtacgggcaagatattggtgacggattctgttttcaacatggtaagagaatatacggtcctggatgattaccagaaggatgaagcgatatagagaggttacaaagaaaagaaagagggggaaagagacctggaggaggggaagtagtcggccatgtgacttatcttctcctcacgttatctgaggggcttatctgcatacaatcaaaaggacgaccggtctcagatagcacgtctgaatgtcttggctttggttatcatgtagtatcgtgtacaaatcgaatggcggtatatggtgtacatacaagttctaacgatctccctagcttctatacggcgtctccaccggtttccaccggagttcttcggcgttcgatctaactggccggagttagcgaacaccgaaattccctaggtgattgcagtttgccttgaccacggagtccgtacattaagcaggatttcctgtatctccccatgaggtaaatgctttcgttgatttcaatgccacccgctaacgacgtgtacgggcagtacctcgcgtcgtcgcaatggcaaaccagcctcctgcgagccgtgtcggagagacaaagtccgctgcgaccatgcattacctgtatgtactcgctgtagagatcgtggggtctctatgcgatgttactatcaccccgcccctctgacgagggccaagggtcgccgtatcttcccactggcagagggggtcccctttgatcgacctccatcagcaaggtatgttaattgtaaattcagttctttgtttcattctcaagcggtctacaccattgagttcccagcggccaattaccgcctcaatttacctccatagatatcaatatatacatatcagcctcttataattgctgtttcccaggaaccctcatccaaccgagacatcactcaatcccgacgtgtctaatgcgggacaagagagctcttctgggcgcatagcccgtacccaaccactgctttctgggtacttcggccccacgagcttcgtatcccccctaaccgaggatgtggacttgggccagggtctgggcctggagattgaatctgcccagagagtcctgccaccctactgggtccacaagatctccgaagtactattaacactcaacgactttcccgcagttgaggccctaatccgtgattattatgcactcagccaaagcgcgattatagcggcgccattcgtgctcaacagccttggaccggtcaaatccatgtgcaaagagaacatagcagaccgtaatcttaccgatttcacatcttcactgacagtgagcataatacaaaacacatctgagattttcgaagttccgtctgcaacacaagggcgagacttccacaccctatttacggggcccgcgatccgcctggagattattgggcttctctgcgccctcgctggtcgggcaagatatctagggctcgcgagtgacaggttcgatggcggccgaacctcgcggtcacaatatgcgcataagatgcttgcagccagcgaggccgcgctgcacatttgcaaaattctcacaccgctcaatgacctgacagtatggctggtacatgagattctcctattgtcggatatagtacatggcgactccagttcgttaagtcttccaatatatcagtcaccttgccttttctaacacctttcaggtcccgcctgttggaaacgactaggcgagctttcaactgacatttttgcacttggtcttcaccgtgactccaagacatcgagcggtgtacccgagtttctcttggaggcacgtagacgccaattcgctgcagcgtatcagctcgacaaaagcatcgccacattcttaggtcgaccgccaagattaccatggcgatacgccgattgtcgcatgccactcgatatcagcgatgaggcactcgctaccgataaaacaatcctagattacactcgcgactgcattgatgagaatggctggaatatccacggagtagtccagcggtcatcatggattcgagtgcgatttatcatcagtacatttcgggatgagattctcgaggtctctttgcagaacgtgacacccgagatggaaattatgctcaagtaaatcatccctttctccgtactgttgttcagcagctgaaactatacaggaacatctctcagcgatgtcatctagcatgggattcgctccccggttggctacgctacagcccgcaatgttgggatcagaatttacacgtagcagtgtgcctcatgatgattatttcatatctggcatacctatacaacgacttcctcattcagagactcattgccgggaagaataatccgcgcggaaacacagcactgctctccgtgagcgctgacatattatcaacggtcctgtcattaggcattcaacgcgagcaaatgattgatctccggccagattttgcgtggacagtaagtactaactaaattgaagctacttctacccatgatactaagtgaatggcaggttctactctacggcttccccagcgccagtctactcatcaaagctttgcagcatcaaaaacgcacaggcgagccattcctctacgagggatctagatcggcacttatccgcaatttgagtgtcttcatttcgcatcttgaatctatagttcggccggataatgccaactatgctctctttcagcgagccagtcagctattctcgaggattatcgatgaaattctagagccgcagtccattcttccggactcgaatcttgatagttctgcttttgactttgatccgatgattgaggttgatggcctggattttttcaataacatggattttggtgttgcctttaatcagtggttgttttaggggcgatccgtgtatatagtcgtgacggaagtgctttgtgaatagacaaatcagagtatagatctgcctctgtgaatttacctcaaggggtaatcatcaacatcgtcagatcttctcggtctcactcactaccaccgtattgggctagactgtatgttctctacgctatgggatggagtagaatccccgcggaacatgaactctcaactatatgaatgattagcaagagaccgagccagagaaaagacagacataggctcaaaggtgattccacctgtgtaatgacgtctgtctaagcaaaagtactactgagtcaccgacttacctcgggaattcgacgcagcccgaggaactgtagctggggtctaagttgtcgtaggtaatggtgaccatgacgatagccagggtgagcgatatcctctgcgtgtctcaactccgcgtcgattgttacgttgacattattgctaaaccccgaggtctccatgaactgggcagagaaccagttccatgacaggacgaggaagatgcgagggaatctgaatacacgaaagattaataggtgccgaaaaaaaggaaaagaagacaatctacaaagaggttgaaaggaaaaagaaattgtggtttttaacaacaatcgacttccttgatttgaagccagccgcttttggcatatctggcaaatgaaggccaggagaatgggctgcaggggcagccatgcgcgcaaataggtatctaatttcctctcgccccattgacccgcgaaaaaagaagagatttcgttactctccaaagcatgaaacgtgaaattattcgccagaaaattgagattgaaggaaggggtcaatgtatgttgtatgacatcgacaccgacaccgacaccgacacccgtttcgtacacttagttgccttgggcgaagttggcctgagctcgggtattcttgatggtcttcttgatcatctcctccacttcatcccagtcgctagtatcaatgcggtcgatggtacactggaagtgctcttggatcttgcgaagcatctcccactcgttgcggttggaaacaaatgagattgccacgccaatgcgaccaaagcgaccagtacgaccgatacggtgcagataggtctggtagtcgggtgtgttggtgcgctgaccgccagagtattcctcggggatatcctgaatgcgagaatggttagtttggacgtgaaagcgaactaacaatgaactcacgtagttgacgaccaaggaaactgtagatacatcgattccacgagcgagaacattggttgtgatgagaaccttagcttcaccgctgcggaaggaatcaatcaccgcgtcacgctgggatccctcgacaccaccagtcagcgaggcgacagtgtggccctcagcaaccatacgcttctcgatctcaacggcagaggcacgggtctagagagcggtcagcaaaattccaatcttaatctgagataatacttacccgaacgaaaatgattgaggatccgacagtgagcagtccgtaaagctgaacgagattctgatacttttcctcgtcagtgctgcaatccatgtagagttgtttaatgccctcaacagtcaactcctcgtgttggagggtaatctcgttagcggcaggagcaaacttgcccgcatagcggtagacatgagcggggaaggtcgccgagaacaggacgatttgaacatttcggggaagcatcctattcaggtgaactattagcccggtactttgagtggtggaattagtacttacgccttggcccgaatgcactggtctcccaggccttgctggtcaagcatgttatctgcctcatccaggacaagcaccttcaaaccggtagggttcatgacacgcttcttgatcatatcctgaacagtaccaggtgtgccaaccacaaccgaacaatccatcttcgtcgggcgagcattagaatcggcaggaacagcagttccgataatgagcccttcaaggaattgacccataatctggatcactccgacaatctggcgggccaattcacgagtaggagcgagaatcagagcttggggtgttatctgcgactgctccgttgagaggtcaagacgactaagaatgttgaggacaaaggctgcggttttaccggtaccagactgcgactgaccaaccaaattcttcggaggattgctcatcagaaggggaagagcacgctcctggaccttggacggcttgcggaagttcatggtagagagacctttcagaatgcgcgcatccctggagtgtcaatcaggttagctgtgagactctcatttggacgcgtatcagtgggtagcacttgcaggcctagatcttcaaagcttttgaccgagaacagggggttgttggggtccgcttgcaagtcactcaatttcaccgcgacggtgtagtcaggctcctcgagatctgccgagccctgcgcggggccagaggcgccatcctccttagaaatggtggagacattggcgggatctgtgaaagtaaagaggatattagctatcagccggggtagcgcgttttccggtcgtgtggactggaggaacagcgacggtggcgtggtctcgtctcgtaccggtgggaatcgactcgtcaggcttggtgacacggtcagccaaggagcctgcagcaggggcagtctctggattctcagacattgtgcaaaagtttcgtgggtatctcgagaaagagttggagaaggaaagatggaggggtggtcgtggggtaaagaaaagttcgaaatgaaataagatggctgagcccgcgattggggttaatatggtcacagctgatgatgcgtttgggactcagaaggggataaaatcaaaagcccaagcacgtcgccagaaaacaagagctctctctgaatggaagcaaaaacagatgacgccgaagaaagcaactagtccgaatttagtcaaagtgaaatatatgtactggtattgtaaactattgtaatagatgggcaggacacatactaactaccagcaacgtgtatgtttggtattgtcacagggaccggtcttctccccgccttggccattgaggtcattcttcctatctgaatggcctcaatagccccattgaacacagcctaattggagacattaactacttggttgatactaagacaggtggttcattcacgagcttcgctggtaaccggaaaccccgtctcattgttcggtctcccattcccgcgctatcccatgcgcgtctgccttggaatctcaatcaagccatggcggccgcagatgtagctccgcatttcggagcagagttaaaggtattgatactggatggtgattttgcagatgcataactaaccgattcaatttatctaggattccttcaaaccagttaacagttgggtatggtccctacatcgtttccccgcaaccgacccagatcatgcgcttacagtggagctaatgcaaacatgttgcacaggtatcgaatggtatatcatgggtggacgagatacaccaattctaccgcgagcgcagcgccattgagaaggaatacgcatccaagttaacggccctgtgcaagaagtactatgaccgcaagtcgaagaagatcagtcccttgagtgtaggagatacacccaccttgacccccggctccctcgaaagcgcatcgctcactacatggactacacaattgaacgccgtggaagctcacgccgccgaacgagacaagtttgcccaagaattggtagtgcaggtggcggatcctctaaaacaagctgccacccagtatgaagagattcgcaaatgccatgttgaatatcatggcaagttagaaaaggaacgggaggcagcatacggcgatctcaaaaaagcgaagggcaaatacgatggcgcatgtcaggaggttgaatctcgcagaaagaaaatggagaccgcttttgatcatggcaagggcaaagcacaagcagcatatcaacaacaaatactggagatgaacaactataaggcatggctcaatctactggaggcgcatgtcctgatgctaacttgcggcagaacctctatctcatcggcatcaatgtgaccaataagctcaaggagaagttttaccatgaatatgtccctgaagtgatcgatgtaagatgaatccgccactcccttctcctatctaggatcgacaatggtactcatacttccggtcagggtttacaaaatctcaatgaaacacgagtcgcaaaaatgaacttgatgtggtcgctcgccgcccagcttgaaaagtcatctcttacaaatagcacgcagcacatggctaatcttcttgtcgaaattcctcgcaacaatcctcgtctggactccttgatgttcctccagcacaatgtgactcagtcacaagaacctccaaatctagaatttgagccgagtccagtatggcacgacgatgctgcaatcatcgccgatgagccagccaaggtcttcctgcgcaacgttttgagtaaaagcaaaactcaaatccgcgaactacgagttgagtcagaccggaagaagcgcgaagtcgaaggaagcaagaaaatacgggaaaatattcaacaaggcaaagataatcgaaacgagttagatgtcgtgcggtccattttcttcattcaagaatccttgcacgaggttgattgcaaatgggtcacagccgaggtagaaacggcgactatcattgcagtggctggagatttatcattgggagcccagaatcacaatttccgctctcagacattcaagatcccaaccaattgcgatctttgtggcgagcgaatctggggcctgtccgcgaagggctttgactgcagagattgtggctacacctgccatagtaaatgtcaaatgaaggtgcccgcggagtgcccgggcgagcaaagcaaggaagacaagaagaaactcaaggccttgcggcaggaacaggctggtgccatacctgttgtggatgtcggcacccctacagcttccactaccaccccgtcactgacgcgacagaatacaatgaactctcttagctcaggatatgcggccagtacgactcggtcgatatcgaacattgctacccagtccacagcagaaagcccagaggatcccccggcccttgttgcagaggcaaagccaaagccaactgtcgcagcaaagaggaaccgggtgctagcaccacctccgacagcatacatgactgcacctccgccgagcgacttgggctcgaagcccaaagaaccacgaggtaagatgctgtacgcttatcaagccggcggctcagatgaggtcagcgtggaagatggggacgaagtggtgattctccaaccagatggtacgtcttttcctaccgtttacacctatatttactaacaatttcacagatggttctggatggctgcgtgtgcgctcaggagccaatgaaggactcgttccggccgcatatgtcgaagccgccccggcaccatcccctgtgccatccgctagtcccagcatgcctgagcgacctgggtcaacgtactccaattcttcttcatccctggcgggaagcgctgcacccaagcgtgtaggaccagccgtcgcgcccagacgtggagccaagaaattgcaatatgtcgaggcattgtacgaatacgaagctcgcagcgacatggagtggaatatgttagagggtgaccgctttgttcttatcaaccgggatagtggtgatggatgggcggacgttgaacgaggcggtgttacgaagagcgtgccggcgaactacatccaggaggtgtaggctggacgtctagattctgcccattggtcttcatacatgatcagaacagttgatgctgtctgagcttgtctgtttgtacggcctcataaggtccagccttggtttccgttggtctttttctttcctgtacagtcggcgtcatcagtgccgtttcgtcattgttctacataaggagcattgggggcattcgtgttggcatccattcgcgagtctcggatagagcataggacacgttgtttccattgaatcccatgaaagtcgggactgttctagtagtctgtaagaatgtagaccattactgaagatatacccgtatacccatcttagataacatcaaaccggatcacacggatagcagttctaccaacttttccagtctccgtagtgatagaagtgagttcacggaagatgtatctttaatgtgacatatttctatttccacaattatcttgactgccagacatctagcgctttagcctagtggtcacaaactaatactccgcatttgaattggacttggtccattgccaagtgcggacgacaatagccgcgcaatggatccatagttacgaatctgattagctcaggctgtaaattcgacaatcaactcaagcccgaaatactttccaagtgctatgtacatgtattcttatctccgggggaaattaaggtagttttgactcgatggtgtgacatgcttacgcctacccggtggattcggcgtgtcagcagcttacatcaccttcgctctagctggattgaggactgatcagtctccaggctttggagctagcatagttcattgtagggtacaaggtgacagaggtacttccaagaaacatcctaggcaatgcctcttggcaagtggaggtatgacataaggcaagtcttagaagtcaactccgtaaatccgaacttcctaatccttccaatatcaccacctcgtgaagcaagtttccgatgctgttaatccgtgatgactcggagatatgaagatacagaggcttaactccccgtgccaaggccgctcagccccggcatacgttatcctccaataagcgccaagagggcctcctcatggcccgtcaaacgtatgtaaatctaagctagaccaaaactcaaaataaccttggaaagcgacatataaccaactggcaccccggaaacccgtttcctcggacgtgggtacttagccatcgcaagctggacttcaagaatcaaaaatcaaatccctccacgcgccccctgtttgaccgcagaacataatgctctttcaaccgttatttaccacgatctgcgtactgcttctcggcttgctagctacaagcgcgactataggcattcggccgcaaatttccgggctggacaacaccctcggagctacgattcagacgattaagaatactatacaacaaccgccgatccacgatgcagcgtcagtaaccgttcttccccggagatccgaagacgaagatcatgacgcaatacccgggctccacgaaacaacaatagactggagagaggatgggtctgagtctctgagactggaagcagagcgtgaggctggatttctgccgagttctcatagtgagaggtaaaagttgtatccagttgatcagctagtcagtagctaacatggtttgatagttatgactcgttaccgcagttttggcctttgtttaaaatttgtgtcgtttcagcaatcgtaatttgtattcttaaaatagcccgggacttgaggaggtagcaataaaagcaaatcatgacatttatgtttctgtacagcagagttggctttgattcatatggcacatactagtctggccatgctgcgttacatgatgggtatctcatgagttcttcctggaccaaaaaagagatgcgaaaaggggtatgattaagataggtgcatagaattggtttcctatctattgtttcgctctcggatccttctagcgcgaagacccgactatttactttgatagcatagttgaaggaactgtggcgcagggatcgtgcaatcttaaacatctgcaacgaaccattatttgcgacaacaacgtcattgggcaatgagttcgatctagaactttattattttattattctgatctcgtggcaatcacccgaggatgatcgacgatccttccttgccccttgcatcacgaaccgtattgcagatcgagtatcttctccttgccatagaacagtcaaggaacaccaacccctgctctatgagcttgtttcaataatctatgacttcaatggcctttgtcctagcatatttctttcagttccttcgaacaaggatatagttagccgtatttactctcatcctgacggagtgcaatattctgtctgccgcccctagcgcaagataatcaggaacaaaagcaagtatggaacaatagatagccaaagcgcacagcgcaacgttacaccccaactctaaagactatgtaacataagagccacccaaaaagcaggctttaggtacgatatttcaaatactgtggggaggatggatgggtcgtctatatgatcgtcacgggtcggcccttggtcttgaaacgtccggtcctgagtttccattcctggcaataaagcataggttgtgtcacccctgaaactttgtatccggctctgcaggaagcatctcgtgtctgagcttaagctattgaattgcaatatctgatacgtacgattatatcacatcaccattgacctaggcctgcaaatataatcaatgatcatcatcctccgatcccaggctccagggctgtgattatagtgaggctaaaactccatatgtgtgtggagctcgccgatcatttgctaaggtgataattaatgttgaagggatcggcgcatactaggacctgatgcaagtgatcggagtgaggcgtggttacaccctcgatctgttcctgtccctggggctagactacaggggtcacgagtgctactgtgggattgggattgaaccatgaggctatcattctagaaaaagtaaatacatactatgctagtcatgtcgtcattgcgtaagtgccttgcttcccaggcatgtggcttttcttggtaactgcctgaatgggcctgatagtggagaatgggggtctggatttaaaacgtgggttttcaaccgaacgaccttgaccgatatttaggataatacggcgatctccgtacaacgtctgatttttaaaagctaaagtggacatattcggtaaaaagcggactgtgattggtccttgataatagtatgttgtaggcaaaatctgcctttatatacattgacataaaacatgttcgaaaatgaagtaacaagaatagaaaatatgtagccttcaagttaggcttgtggccaatgtgtgccaaagaactccccgctatgatgtcgcttgccaaaaaccgagagggaaagatgcgcctctgagaatgaaatcaagatcaaacaaaagaaaagaaagaaagaaatggatgcgaagtcgtgctcgctaaagccttggtgctgaatgtggctcaaaagagtagcctcgtataagagagaataagatgtcgcgaagtgaatcgttggtcgtgtgtgttcttcagtgaatcaccgagagagtaaaagaaaagatgcagttcatgcagttcgtgccgtcgccctcgaccctcgacgatattttaaatcatctcgactgaggagtcggcgtattctagagacaaatcgacagggtcttccatctggggaatgttagaactgaatgcgaccgaagaagaaaggacaggagtaagcttaccatggcgacgcatggatatggaggaatcatccacaggctgtgtagtgtaggctgcagcccaataccccgtttctcggtaaccggtgaaggtgcagttgctaggattgtactgtggctgcagggcggcaacatgcgggtagagcgttgctaacggtgagagaagctcatctgatggtggtggtgaccgtctgctatcgatgcttccacgagactggaatgtatatgttagactggttggcagaagtaagcatggatcgtacttacgtagagctcatagttggttttataactcataatgttggtagtgatggtgtgattgtctcaatgcaagatgacgagacctagttcaaatctgaatgctgagatgcaggtctcaccagaagcgaagccggctgcatttaaatgtatcggaaatgctcagccgcagcaaaatttggaagcgggggaaattaagacgtcaagatccgcatctaatcgcctagtttgttttcatagataggatttggttacacccgggaactcgggattagatggtctccaccgaaacgtaaatgaaaccttttcattggctgccacgaggaagtctaagcgttagggccgatcggagtccccgatgtgggaaagtcgggatacgaggattgcagtttgcaggatccctgcagaccatgaatcgtggcatcctcgttcgacgttgctgcccccttgcatattcctcttctcgcttccacgttttggttttacccttattctcatgaacatgtggtcctgcgggggggagcaaatatcgtcgaattccgaaatgtaagatgtgatacgagatcccatccccgaaccgatccggactctacctgtttcctatattgtataatgtcaagatgatttcattctaagcagaagtgggccacatgtcagccatgtcgcacaggtcaccaactaagacaatctctaagcgagtatattaaaagactaatgagatcactgatcttccgctagttgtaaggtttccaaatcattttcaaggtgatccagggcgagatagtgcgacagactagccccgaatatattgcactattgataacgctacgccagaaccgctctagatcggccttgggaactgcctattcgggcctagcggacaattccattgtcggttcgggacacagccacacaccccttgctatttgtggacaagcggacgagccacatcgtcggtctcaccgtggctcaaaccgtggctcaccgtggctcaccgtggctagtgaccacatctgtggctcaagcttggtttttgttcgatagcttcccagatccactccaccctgcttcacctcggaaacccgaactagtccgcccttgatcttcacaacttatcgattttgggcacccttaatggctcggtcttccccgtccgctgggtcgcggagctataaggcattcgtctcccccagaatcatgaactattccacaagtctaaatccacctttcgtttgaagtcttcctctttgcgcttcctatatcaacacatgtcgactgtcgaacatgtcactgagaatgcagggttctggaagagagtgctgggaaaactctcatcatatcgacatgcgcgacccttactctcgcgaacaacccgctcaaagtgagttcctttttctcttcacctcccctaccccggtcgtgcccattgcgccggttacaccatgacccatattctgagacctttcgcctttgttccaggatccgtcgaacgagacgctgaacgcatccccgataggcgcgaacgctcccacgacgagggaatgaacccagagacgcagtccatgttgagcgatgccgagtttggtcgcgtggaccatacgggctggttcccccactataagaattgtgttcaacatttcgtggactacagccagcatacgccccaagtgcagtccattgccgcgttcatcaatattcgactaccctgtcagcgacctgagtccagcgcaccggtggaaaccacgtcaatgccctttatttcgctgcgaccctacatccgacgattgattgtcaccgcgcaagactcaccgagtgttatgcaaggcttcttcggtggtgactgggaggctggtgtgggctgtatctacaagcaagaacgggtgaactatatgtttacggccaaaagcagtgggtgggcagctaccaagaccgcctacgacatttctccagatgaagaaactcccttcttgaggcccctgcgtgacccctcggaggatgaaattcgagtggccgaggcgcggtggagtgaatggctggcaatggaagattggatggttggagcgcgcagtccctggtaggatagcgcgatcatgaggcacgaatttcctattcttctcttttcgtttttttttttcttatgtccctcgtgccccaaaaaaattacagagtgtgatgtggcccaattcactgagtataatgacaaacgtacttttttttctccattttccatgccatactccgtagggatagttcttccccatagcaatgcagatcatcataagcatgtcaaaaataaagtaaataaagtgcagacattagagttgacgagatggtcctgcgtcataatcgatagtgcaccgccacaggcacagaccagagtgacaaatacttaaactcggagatcccaaatattaatttaataaaattccactccggacgtccgtgattttacaaaagattattctgatatctaactaaccagactcagttagggctatccacctctgactcaccgtcatgtcaggtgtcaacctgtcactttgcgatcaaatcgaggatagtctcttctgcaagttcgcttcaactcgtgtagagatatcgaatccaggttcccgggtacctggtacctcgcaatggcatcgacatgcatctacgagcatgatgcagccacaataatcccagccctcatatctgaactgccgtattccaccacgctgctccggcgaatccagcatggaattgggtatccgcacgagactgcccacatcctggcgactttcccacccggtttagcccctgagcctggacagccgtggctggctgcgcgggtggatctctttgccggccgcacaacacaaatgttcatctactccagtctcgaagcggagcacacgtcaattccgccgatcgccactgtcggcgatagtatcaaagccacgaaaccggagatattaaatgtggactctggatccaataataaccgaaccaaaaatggtaatgatgttggcgcaaaccctgacaccaacaccaagtccattgtttccaccttttccgccaacccgcccgtcctagccttggcccgcgcccagctattggatttgctgtcatatgtcaagaccaaattgctgccatcctatctgtcatatttgcaagccacatctgcggaagctgaatctcttcccgtgtcgacatccctggtgaccccaaacaccactcccagtaccaatagtactagtagtgttcccctgattgccgcgccagacccacacgccttcctcatcggtgcccttcatacaggtctattctgtctcctgcagcaatcaggctcttacacccaatctgacccgataccttgtatccgggtccatcgcttcgacgatccgccttattacaagtacttcttccggagatcagagttcagccccgatgcagatctaccgtgcgccgatctgtccctcccacccgggtataggttccatgaccgacaggggagggagggtgttctgagtaagcatctagatcttgtgcagagtcggacgcatatccccaggccgaggtcgcagctatctacaatgcctggtatggcggtctattttgatggctctagtgatgatgatgaaatgcctattgcgtggggattcttgggtgtagatggagcgctggcgacgttgcatgttgaacccgagcatcggggccgcggccttgcggctgcattgtctaaggctgttatgcgtcatgggatggcagtagatgggctttttggggctgggagtgttaactcggaggatagtcacactcgagaatgtattggggcttgggcgcatactgatgtagctgggtataatcatgcgagtcggagggttatggagaagattgggggtcaggttctgacgactgtcacttggactgttattgagttgcttgattagcgttttcatcttgggttgtctatatgagtggaagatatataatgaacgatggaaatgagtttatatatctttacacttatctatgcagcgatagctgtcggattttacaataggtgacaatttcaggagtaattctagttctctaatatttacatgtaaatggattctagatgaagccctaatatcatagaaactgcatagttatgttgtaaacactgaacgttgactcacctatctccatcgtccccagatattcccaattaggcttagtggatgatcgggtgattcgacgagatacacgggggaacttcacttcgaatttctctattttcttcatttccaagccattgaccaatctccgttccttcaaaatgagtaatcccaaaggcgtcgctgagaacatgctctggggaggccgcttcacccgtgagtaccacaacccctccatcccaccaaaaaagcccactgactcatacaaaaaacagagggcctcgatcccctcatggtgcagtacaacacgtccctcccctacgaccgcgtgttctggaagcaagacatcgccggctcaattgccttcgcccgcgccaacaccaagtccggcatcctcacaccgcaagagttcgccgagatcgagcgtggtttcaagcaagtcgccgaggaatggcaaaccaacacattcgtagccaaggagaacgacgaggacatccacactgccaacgagcgccgtctgggcgagatcatcggcaaggatatcggcggtaagctgcacaccggtcggtcgcgtaacgagcagatcgccacggacatgcgcctgtggctccgcgacgagctccgcgtgatcgaggcccacctgatcaatctgatcaaggtctccattgctcgcgccgagaacgatatcgcctatctcatgcccggctacacccacctgcagaaggcccagccggtccgctggtcccactggatcctgtcgcatgccactgcctttgctagcgagttggaccgtctccgcgaggtgatccgtcgcgtcaataagagccccctcggtaccggtgccctggctggtaactgcttcaacattgatcgtgaggccatggccaaggagcttggcttcgatggcttgctgtacaactccatgaacgcggttgcggaccgtgatttcgccatggagaccatgcagtggggtagctcgttcatgctcaagatctcccgctgggccgaggatctgatcatctacagcagtctggagttcggctttgtccgtctgtcggatgcttactcgactggatcgtcgctcatgccccagaagaagaacgcaggtaagtttgactttagtcatgtactatagtagaatactaacatgttccccattagacagcctggagctgctccgcggtaagtctggccgtaccttcggccagatggccggcctgatgtgcacaatcaagggcctgcccactacctacaacaaggatctgcaggagagcgtcgagcctatgctcgaccacgtcaagactgtcagcgacagcatccagatcgcaaccggtgtgctctccacgctcaccgtcatcccggagaagatgatcgccgccctggccccggagatgctggctaccgaaattgccgactaccttgtccgcaagggcgtgcctttccgcgagggacaccacatttccggccgtgtcgttgccctggctgagaacaccaatgtccccatggacacactctctctggcgcagctccaggaagtcgacgcccgcttcgatgcggatgtccagacttgccttgactacgagcgtgccgttgagctgaaggatgccattggtggaactagcaagcgcgcggttctcgagcagaccgccgtgctgaagaatttactgtaaactcttttggtacgatatatgacagaaaataaatgttaggcttttggttagactaaaatgaatatatgaattgacttgtttagatgtctaaaataaaagagtgaacttatatgctgctattaaaggagggatatcatacaacataccagaccattaagccggaactccaaccctaacataaccccgaaaatcaagatcaacccctcaaacccctcctctggggctcatacccatcctgccggacggagacttaatatcatgtccaggagctccctgtgccgcctcataagcaggcgggacatcatgaccctcggcagccacaatatcatcttccgaactgcgctcggcaggcctagacgcactgcttccacctccctggggattagaagtaaggccaccagtttcaattccaagcccagtccctccccgatccccagcatactgcataaaactcataacatgatccgtcccgccgcgctcagccgttctccccctttcgcccagcgcctgggacccagactctccaatttccataccattagagtatcggtccagattcgcgcctaggacaaccccctcggcagtgacgacccgtccagcctggttccgccccggactaccgccggcgctgtggctgtggctatggccgctgccggtgtcggctgctcgtgctgggcttgctgggcttgcgcgtgaactgggtatagaggccaaggcgggcgattcccaggcccgtggactagtccatgagttgataatgggctgctgtagctggcgttgttggagggatacgttgatcagctcgctctgggcgtgcgaggctagttcggcgcgttgccggtggaagcctgtgtctggtagctcgggggtgaatccctggcggggagggattgaagcgaagagctcgtttgagtgtggttgggttggggggatgggtgttttgcggggagagtgggagatgaggcttgtggcggaggactcaagtgctaggtctggggtgaggattatgcttcgtgtgctatctgtgaatggggaggcggcgctcgatgagtctatcgatgcgatggcttgtatcagtgatatgttacgctgcctcaatgggtaggccagttagtctgggatgtgtttctgcttactatgtgcttcgctgtctgatggcgatagcgggcctttcatttcggatgcagttcctcgatctttgtaccatgagacaagagttgtgccctcgcgtttcccatgttttctcttgcggcgacagcaacagaaaagcagaatggcacatatgaccaagacggcaactcctccaacaacaccgccgatgattgcgcctaggtttgaggatgtggcacctggggtattggatgaggtattggatggagatgcgctagatgtaacacctgtagattctgtagtcgtggatgtgtcagaatttttagaaagtggcgatgaagtcgccagtgttactgaggatgtgggtgtctccgaacctgttgatgtatttgaagtactataagctgtcgacgagacggtagcttgtttcgacagagtggatgtaggggaagtagtgatggttttcgtcgtcacgctggacaccccagctgagatcgatgagagtgtgtcatcgtcgtcgtccggacaaatcccagtcgtacatggatcagttgcgcagcatccacggaagctgcctgccgtgcagacataccacagcttggacccagtgcaagtagtatcgtctcgagggacaagagaccacagggactcgggagactccatttcgaataccttgaagatcaagtctcattcgccgaagaagacaactcgatcgaatcgcaagacacagcaattacgctggatagcacaagcttgaacgactggaagcgagagatctcgtttcaccgatatttgagaatctgccagaaatgataggtcaaatgggttgtgcctcgacaaatattctttgcaggcggcattcattaactttcgaatggagaccacgaccctgttttctgaaagaagtcgagaaaggattcctttgttggtgcggggtggcactgccatgccaattatagatccttgtatgtttgtcaccaatggggtccaaggctcctgcgcagcagagttgggttttctttagtgcagtagatgcgtctctttgacgcagattggataatacggtgataaatgatcgcagaatctaagaagtcagcaagaaatcagtcgtaggtcaataaacaaggttcgaaagactccaaggggtgttcggtttctttgttgacagaccagggtcgaccccggggattttgagccaaatcaaacaaaaaaccggagttttgatatggacaaggagaaaactacaataagaacctaagacggggcacagaaaagcattaagaagtaataaatcaaatcatatgagacaaacagagggaaaaagcactcagcacaccaactcttcgcctgttaagataaaggaaaacaatatggctatacaggatggtaagtaacacagtcaacaaaaaaatggtctttttcatagatatttccccttgaaacgggggccttgtgacgccacaagccatagttccgtctcgaaactacgaggctgggagggcgtcgatagggtccatctgaaacaactccgtggtatcctcctattctctgcgggtcgtatccaaaatagcgagcttagtagacacgcttgaaaggaggaacagacttgcactccgactcatccaaggtgtgggactgaacgggacggtagccaagcttgatctcgccgtggggaaccttctgccaggagagagtgtgcttcatccagtgctcgtcatcacgctcggggtaatcctcacgggcgtgagcaccacgagactccttacgagctgcagcggaagcagcggtttgggtactgtgagatccaatgttagcaagcgattcctagatcagttattcggagttacgtacgcgcaagtgagcaggttgcggagctcaagagtctccaccaagtcggaattccagatcatgctgcggtccttagtgccgacctgttcgtacagctgatcaaccttgttgatcttctcaacaccctcgtccaagctcgactgggtacggaagacgctgacatcggtctgcatgaccttctgcatagcgttgcggacttcaaaagtcgacttggggccatcggcattacgggcgtggtcgaggtccttgacagactgagcaccagcatcggctgcaaggggcttgtggggctggccagggctggaaatgtcacgaacacggtgagacacagcgcggccgaagacaaccaaatcaagcagggagttggcacccaggcggttagcaccgtggacagacacacaggcggcctcaccgcaagcgtacagaccgggaacaggcttctcctggccgttctcatcgacattgagaacctcaccagtgtggttggtggggataccacccatgttgtagtggacggtgggcaggacagggatgggctgcttggtaacatcaacaccggcgaaaatcgaggcagtctcggagataccgggcagacgctcgtgcaggagctcagcgggcaagtggctgagctgaaggtagaggtggtccttctcgggaccaacaccacggccctcacggatctccagagtcatggatcgggagacaacgtcacgggaggcaagatccttggcggtaggagcgtaacgctccatgaaacgctcaccctcggagttgatcaggtaaccaccctcaccacgggagccctcggtaatcagacaaccagcaccgtagataccagtagggtggaactggacgaattccagatcctggttagggagaccagcacgagaaaccatagccataccgtcaccagtgcaagtgtgggcagaggtacaagagaagaaggctcgtccgtaaccaccggtggcaaggacagtgtggtgggccttgaagcggtgcagagtaccatcctcctggttgtaggcaatgacaccacggcaaacaccatcttccatcagcaggtcgagggcgaagaattcaatgaagtagttggtgtggtggcggagagactgtccgtagagggtgtgcagaagggcgtgaccagtacgatcagcagcggcggcgcaacggtaagcctgaccacccttgccgtaatccttagattgaccaccgaaagcacgctggtaaataagtccatcctcagtacgcgagaatgggcaaccgtaaccttcaagctcgcggacactggcgggagcctcgcgggtcatgtagtgaatggcatcttggtcaccaagccaatcagaacccttcacggtatcgtacatgtgccatctccagtcatccgggtgcatgctaaaattcagttagactcaattcggtaccttccggtgcttgcggtgaaaacctactttccgagggcagcgttgataccaccctgggcagcgacagtgtgacttctcgtagggaacagcttggaaacacaagcagtcttgaatccagcttcagccagaccgaaagcagcgcgcaaaccggcacctccggcaccgacaacgagggcatcgtactcgtgatcctgcgcatgttagactcaatcaaccgcctgtgagtggtagctcttacaatgatagggtacttgtcactcaggtagccactggactccttagcgcgcaaaggctggttggaccatatccgggctggcgcagtttagttagtgacggtgcgttcatgggttgagtagtctaatgcgtacctgcgggctttgaagatgagaagagacgtctttggttcctcaagatgcgggaaacctagagagatcttatgagtatgtcatggccgttgcgaatgggctgaaaatcgttgcatggctactcaccttggaagcaggagctaaactccgcatactcatggagctcataatggcggatcaaacgagaattgggtttccctaaatgaaccgagataatcgcaggacaccgagggtcggtgacaggcttaacaaagaggggagattgtggaatagcgaactccttccagggcgacactttcatctggactcgggttacggttgaacagtttcacgctgacataatcattctcccagttgccgacggggaggaccgggccaaattagccaatcagcagctgcgcaatgaaaatcaacctcgggcagccggttgcccgtgattggccaattggaaaggatccactatctaggtgtgatattccattttgccggccaacacagctgcccggaagtcaacggtagagcgtcatatcacgggatcttgaatctatatctggttatcttttctaactttagtcccacttttcctagtagaatgacgtgcaattgctggatatcgatcattgtggtatctagtagttagatcgagatagtcatgtgattcaatatgaccagttagaatcacatgacaagccgtgtgcattccgaccaaatcaggaaagtatacggactacgtactacattggtagtacacaggttgaaattatattgcattgaccaggaaaaaaactcccatgtaacaagacaatagtgatcgtacatcccatccataatgcaagtgagtcggaatttctagttgtactgcatatatgtagccgtcgagttgaacttgaggttgcccttaatcaccttctcaacggaggccaagaagtccttctcggtggccaccttacggcgagcccgaatagcaaacatacccgcctcagtcgcaacactgcggagttcggcacctgtagcgttggggcacaatcgcgagatcagctcccaacggatgtctcgctcgacggacatgctcttggcatggattcggagaatgttggcacgaccctcgacatccggtagtgagaattcgatcttacgatcgatacggccgggacgcatcaaggctgggtcaagtgtagacggacggttggtagcgaacatgactttaatgttaccccgagagtcgaatccatccagctgtgtgatcagttccagcatggttcgctgcacctcgttgtctccaccagcgccatcgtcaaaacgtgcaccaccaacggcatcaatttcgtcgaagaaaataatgcatgccttcttggtacgggccatctcgaaaagttcacggaccatccgagcaccctcaccaacgtacttctgcaccagttcactaccaatgacacggatgaaggtagcatccgttcggttggcgactgcacgggcacaaagggtctttccggttcctgggggtccgtagagcagagcacccttgggtgggtcgataccgagattcacgaagcgctctggcgatagcaagggcatttcgactacttctcgtagcttctcgatctgttctttgcatccaccaacatcgccgtaggtcacatcaggcttatcttcgacagtcatcattgtcacgctggggtcgatctttggcggcaagggcagcatgatctgatacttattacggtcgacgctgcgaagcctagtcagtacatagaaatgacatataatccgccatataacttacccaactctcatgccttcttcgatatctgtcggactaacgcgctctccgaggttgacaacgaacttggcaatttgcttgacgttgatcacgtatttgctcttgtccgagtccttctcatcctggataatctttgtgcacctcgcgacctgtagcggctgttcctccgccatgcgttgtcgatcggcagcaacatcccaaaggtgtggaggcgccaaaccggtgtcagattcctggtaagacattagctcgagttgttcaaggggccgaaagagctggataagttatcaccttaacgccgatcttctcattcacgctgttttgcttttccttgatatccttctcgagcttcttcagcgcattcgcgtaaggtgcggcgccgtaggtcttgagtactgcgatgtcactgtaataagacgtgtcaatcattgccatcgcgctttgtgtagattgaatcgacacagaccgggaactcactcgtctgtaaggggcgtaatctttttctctggttcctcatcgtctgcgtagttcttcttgaacttctcccagttctcacctgtggcgctaggcatgatgaaaggtgttgacagcccaaggccgagttaagggagggtctgaggaaacaatgaaatcgaagatgtatatgcaggaggaacaaattcgacgtgatctaaagcggtgtcaagttgaaaataagatagataggttgggtattgggagagcaaaggacggtgatgtagcagagctgcggtggtcgagctagcctcactaatcaggtgccaagcttcatcaccgccccagaacctcgcagaatttcctgtgtgtcctccaccacaacaactcaactatctcctttcactcatttttaaaggttaattttgaatatcgatcttcaaaatggcctccgtactagcacagggagccggcggcaacaactccttcaaggtgcgaggcctcaaaacgatgtgtgtgggccactgatttctgattgcatgcaggacaaggagaagccgatggccgtgcgggcctctaacattctcgctgctcggggtatgtatattctcatgatgttaaaggcgcccatgctaacggtataatagctgtctccgatgccattcgaacagtacgcttgctcaaacgatctgcggatacatagatgaggggctaacaggaatatagtctttgggacccaggggtatggataagatggtgagtttatctcggatttttcttctatcagtatgctaatgtctctctagatccaaacggccaaaggacggaccatcatcgtatgcagcccaattcaatccgaacatatcagaagccacaactgaccccccgcagacaaacgatggaaacactatgttgaaggatatgagcgtgatgcaccccgctgcccgcatgcttgtcgacctgagtgcggcgcaggatgtcgaagctggtgatggaacaacatcagtggttgtcattgctggcagtctgctcggcgctgccgaaaagttgctaggcaagggccttcaccccactgttatcgcggaatctttccagagagccgccggtgctgccgttgagatcctccacaacatgtcccgtcctattaacctctccgatcgttctaccctccttcaagccgcttctacttcgctttcgtccaagatcgtgtcccagcactccggacttctgggcccgatggcagtcgactccgtcttgaaggtttgtgacccgaagaccgcagagaacgtggacttgcgggacatccgcatcgtgaagaaggttggcggcacaatcgaggatagcgagatggttgatggcgtggttttgaaccagcccgtgatcaagagcagtggtggccccacaagaatcgagaaggcgcggataggtctgatccaattccaactcagcccgcctaagccagacgtatgttaattcgctcctcaaactgttactggaacaagattgacaattagattctagatggagaaccaaatcgtggtgaacgactaccgccagatggacaagatcttgaaagaggagcgccaatacatgctcaatatggtcaagaagatccagaagactaagtgtaatgtccttctgattcagaagtccatcctccgtgacgccgtgaacgaactttccctgcacttcctttcccgtctcaagattctcgccatcaaggatatcgagcgcgatgaggtcgagttcctgtgcaagagtctcggctgcaagcccgtcgctaatgtcgactctttcactgaggacaagctcggcagtgccgacctcgtcgaggaagtgcagtcctccggtgctcgttacgtcaagatcaccggtatcaaggctcctctctcctcttacaaccagaccgtctcaattgtcgcgcgtggtgccaacagcctgattttggatgaagccgagcggtctttgcacgacgccctgtgtgtcattcgctgcctcgtcaagaagcgtgccatgatcgcaggtggtggtgctcccgagattgaagtggcccacctactcgccatgcgtgctcgtgagcttaccggcactgaggctatctgcttcaaggccttcgccgatgccatggaggtcatccccactactctggctgagaacgccggtcttaactccatcaaggttgtgactgaactgcgccaccgccacgcccagggccagcacaatgctggtgtcagcattcgcagcggtggtgtgaaggatgatatcacagaggagaatattctccaacccttgctggtcagcactagtgcgattgagctggccgcggagactgtgaagatgatcatgagaattgatgacattgctctgtcgcggtaaacgccctcggcggccgctagcgtgagctgtatgatggaaagcgatctaatcgtgacgagtaattaaaaaaaatatcccgttcctgcatagaatcactattggactatacactttctgtgcaatgtatatggtagaccgagatccctgcaatgctatcctcgcaagttttataataaaaagtgagactcagggcaagtatagatatactcgagggtgtcatattgacatgaaagatttaaaattggagaagtatggcctgaaatatatagagcaacactgcgctcaccaactgccatgagcagccaatgataccatggacattctgcagttacattagcgacaagtcttcgtgagaattgaactaagaactatcaatatctaacctaaaatgggcttgaataaggatattagatgctaaacaaatgaatagactctttgtccatgccaagaatggcctcggcctgtttcgcaagattcgccattcggaagccagccctcgaaagaatgacctctgcttttctatacattgtctcagtaattcggcgactataaatatatatacaatcacactcactgtcattgcaacagtgttgctggcgctcggctcgaattgctggcgataagagatagagtgacgatcgacgtcagctccgcctgctaactccgatcgacagccaccatgggaaagttcgaagatgaagggaactcagagtccgtaccattgactcgacaacggtcggaatccctcgcctcacaaatatccaccgactcgggcctctcgatttcctccgagtcatccatgaagaaccacaagggaggcaacacgctgccgatggaggaaggggaaggggacagataccgggatattgaagacggaggagaaactggcgcagatgagcctcttatatcaaaccggaagaaggcaggctcatccggtcgtctgcgccagatcgtctggttactggtgtttctgtgcgtcggtggctgggtgctctctttcgtgctgttcctcacgcagaagcgacccgataatgcggcgctctcgtctgcatcaaccgtggacgtccatgaaccaggcttggctactggtaataccagccacgggaaaccagtgacactgcaacaaatcttgagtggtacctggtctccgaagtctcatgcgatctcctggattgcaggcccgaacggcgaggatggtcttttggttgagcaggacgagaaaaaagacgcttttttgcaggtaaaagacatcagcggtaacaaagacggcgtcgatcatctcgagaccagagtgttgatgaagaaggggtatatttggtttgatggggaggccatcccaccggtcaagacgtggccaagtcctaacatgaaaaaggtcttggtcatgactgacactcagtccaattggaggcactcgtattttgggaaatattggatcttcgatgtggcaacgcagaaggccgaaccgctagatcccgggaacctgagtggacgtgtacagcttgcagcttggtcaccaacctctgatggggttgtctttgttcgtgagaacaacttatatttgcgtaagctggcctctttggaggtcatccctatcaccaaggatggcgacgagaacctcttctatggtgttccagactgggtgtacgaggaagaagtctttgcaggcaacaccggcacctggtggtctgatgatggcaagtttgtcgcattccttcgcacaaacgagtcagcagttcctgaatatcctattcaatacttcctttcacggccatcgggcaaacagccaccgcccggactcaaaaattaccccgaagtgaggcagatcaaatacccgaaacccggcagtccgaatccaattgtcaacctgcagttctacgatgtcgagaaaaatgaagttttctcgtttgacatgccagaggactttgtcgacgatgaaagaattatcatcgagattgtctgggcgtccgagggcaaggttttaatccgagagaccaaccgcgagagcgatgttgtgaagatctttgttatggacacaaaggcccgaactggcaagctggtgcggtcagatgatatcgcagctctggacggtggctgggttgagcctacacagtcgactcgggttattcctgctgaccccaaaaatggtcgaccacacgatggctatatcgacactgttatttatgaaggctatgatcacttggcttatttcacaccttttgataacccagagccggtgatattgaccaagggcaagtgggaagttgtcaacgcaccgtcagctgttgacctgaagaagggtctggtatacttcattgccacaaaggaggctccaactcagcgtcacctatattcggttaaattggatggctccgatcttcgacctctgacggatacatctgcacccggctttttcgatgtttcattctcccatggagccggctatggtttactcagctataaaggcccatcagtgccatggcaggccgtgatcaacacccaaggtgacgagattgacttgataaacctcatcgaggagaacgttgaactctctaagatggtcgaagagttcgcccttccaacggaggtgtacactaatgtaaccattgatggttacacgctccaggtcctagagcgccgccctccaaacttcaaccccgaaaagaaataccccgttcttttcttcctatatggtggaccaggatcgcaaacggtagaccgcaagttcacgatagacttccagacctatgttgcctccagtctgggctatattgtcgtcactgtggatgggcgaggaacaggtttcattgggagagaagcccgttgcgttgtccgtggtaatatcggccattatgaagctatggatcagatctcgacggccaagatctgggctagcaagagctacgtggatgaaagccgcatggccgtttggggctggagctacggtggctacatgaccttgaaagtccttgaacaagacgcaggcgagacgttccaatacggcatggccgtggcacccgtcactgattggaggttctatggtacgctccttgaatcattactgttcagtttgtttcccaacatgcacatactaacatcctccttcgtcatagactctatctatacagaacgttatatgcacacccccgagcacaacccctcgggctatgcaaatgcctccatcagtgatgtcatggccctaggccacagtgtccgatttttgatcatgcatggtgttgccgacgacaatgtccatcttcaaaatacccttgttttgatcgacaagctggatttgaggaatatcgacaactacgacatgcaggtcttccctgattcggatcatagtatacaattccaccgggcgcatgcgcttgtttatgaacgtaagttgattcccaacgcgcttccattcaatcgcttcccaaggttgggaaatgagatgacatgactaattgtgaatcaaggtctctcgagctggctcatcaatgcgttcaatggtgaatggcatcggaccgcgagtccgaaaccacaagagtcgacgtgaacgcagacttttgcttttttggaattatgtacacccttgggtatatattctactaaacacatatagctttgaattaaggaacaattgatgcatattatgattctgtattctcattaagactaagaatttatgatagaaggactgtagtcgctgaggtatgccacaatttgtcaacacgtcaacaaaattgataccagacaaaacatattaacagagggcttttgaaacatttcctatggttccttccaggaaccaagacaccgaataatgcatgtatgaacagaaacgcgaaaaatatacaggaatgaaatgcagtatgtgcaagtagggtaaggaaggaagggtgtgtgtatacaactcaaatcaagacgagcgactaggagagcgcgcgccaggagaaagaccgccagcgcgaaggaagtcctctctgttggcgacactgacatccgaatttcgataaggaaggtagtcttcacgctgcaagccacgcagctgttcccgaccgacagttgagacggagcgtgcgtaggactgaggacgagagagggtcggacgggcattcagcacagacagccgatgactggaggtccatatgggtgatttactacccggggacagcacggtcgtccttggcgcaaagacaggcagacgagcgaaggactcggtatccgtggagacattgctcatgctcatagccgagatgtcagacatgggacggtggtagccgccgcgactggggatatgggacatggaactgtagacggtggagataccggactgggcggacgagcgccaggagttcaccgcgtcgcgcgggatggtgatgatctcttcgtcgacgccggtctcgatggcggctgccacgtcggcgggctcgatcgggtcgcctgctgcgcggctggccatcatcttggccgacttgccaatccacaacatctgctcgtgctcgcggaggtaccggtcgccactgaaagatttctggacaatcgtgcgggtcatcatgccgagtttgcgacggtgctcgctcttctcgtacatacggcgggtgatggctgtgacttcttcaggggtggggtgggaagtcaagactggggcggggcttgtgtcttcgctgtgtttgctccattcgccaagcatggcaagcatgccgatttgggcctttgccagggcgagcgcgtcgtttggtgcgacaacggcactgaagcgggagaagtcatctgggtcgctgaggactcgaagggaagcaccgacgtcagtgcagacgacgggagctccagtcagagcagcctctcccagggcgagaggaagaccttcagacagagatgaattcaagaaaagccaggtgttctccaggaccttcatggggtcggcagttccgcggagtgtgactctgccacgaagaccctttgatgcgatgatctcttgacactcagtagagtaagtcggagccttgtcaatagcgccatagatgtccaggtggtactcgtcgaacttccactggttgatgatgatatccgcagcgagaagggcagtcttgatgtccttggcataccaaacgtgggataacatggtcactgtcggacgctcggatttgatttccttgaccggagagaacttctgcatgtcagtgattccgttgacgacaggatcgatctttctgcggaaagtgtttcggtgctcaatcgtgccctggcaggtaccaatctcgacctcccaaccggggttgaagaagtcggcacagggaaggaggatgtctgcgtggtgaagggtcaagacggaggtaattcgcatcaatccaagtagcgcgtttcgaacaaatggcgagagcttgcacaaggcagatgacagacagagattggtttcacgccaactgatggcgtgatcccaaatctgcaaggtacagttgcgcttgatcttgcatacaacaccgtaagaggcgctgacactgtgatgtgaggcttggaaggttgaaggaatcttttcaggaaccgggatcgagaagatgaagagatagcggtaccagagctccagggcgacatcgagagatgtcaaggtaggaagctcagtgtcgaaccactcggatgacgggatggtgtttggcatttcctgggtcagccacaactcacgccagctctgtttcacaatttcagtgttccacacctgagtccaatgacgggactcctggaagtatgtgttcagattcacaagtgctcgagtcgcttggtggatatcagccttcgagagatgaactgcacgggcacccttaaccaaagctgtcagaatcggaatgaagttcatcttgatgtcgtactcgctcgcggaggtaacattgtccacctcagcatccagcttgttgtggaacaaaccgtgagttggagtgaggaagtccataccccaaagcgggatgagcttcagagactggatgttctgttcggtctgatgctttggaacaccgaaatcgttggcagactcgcaaatcatgtgccatttgatggttcgcagagagttaatcatatctcgtcgacaggcagagacaccaccaccttcattaggccaggtaccgttgtcggccgccatgacatggagcgtcttttcggtatcggtgccaaagttcttggagcgagtgttaacaacagcatctcctccagggccaaagttgagcaaatcggtgagcttaacggcgagtggggtccagctggaaatgttgtcgtccagatccgcactggccatgatcgcatcagcgcggagatccacgtatttctttgcagccgcgagatttccccagtcacggctgcgccagtaagggtgaagaaccttatctctgcgcaggatacggtcatccatccagcgaacgataattgcatcgaagtcaacacgatccttccacgccttccacatcaaggagcgagctcgagaagttgacataacaaagcgcttcttcgtgaggcccagtgtccgggtaaggaaagttgactggagactatcgcagtaaacaaaggggttatcatgcacaaaactggtatactttggcttggagagtacacccagataatcgtgctcaatcatcggcggagtctgcatcttctgcccattgatagtggtaaagatggtgggatggaacttgtgatcatacaaccaacgactttcataaacatcggcgccttggacaaagctggcctcggttaccttggagtgaggaatccagcgttcaaccttctcgggatggcgacgcggaggcgcacaccaagacacagtacagctgatgtgggacaagacaaattcggctcgcaacagttcatcaccgaaacgggggttcttgcgatagtggtacttgaagcggataagattgccatccttcatgtacgaaccagattcgataagacccttgcggttgtactggacgctttgcagatggttcgctcctgacacgcaacgtcgtcctagcggaatgcggtttgaggatttgctaagtttgaagctcttctttgtcggagatcggtagtcgtagtggtattcgttgatcactttgccgtccttgaactcctgcttgaccagaagcaacatctcacccgaaaaggtactgacgaacttcagggatttgacctccttgggctcagtgctatgctcgccagcgtaatggtagatcttgaaagtgccatcaatctcgtggtgcctgaatgctgtaaaggtgccgtcctgactctggacaatgatccggctctttttgatatggatcgtcatgcccttagtctcttcccacagccgcttgacatttttgcggccatggaagaggaagaaggacaagcccaagtcttgaacgagcttggaatagacccagaccatattcaataagaagacggttggcacacggacaacgctcggaaggtccttggtgacatgattgaactctctctggaattccggatctgcgactgaagctaccacacagaacttgataattgttcccagcttgtggtaaatgtagctagctggtgatcggagtagcgacaatgcgaccgggagcttccgaggtatataggaaatgtacttcgaagtctcggatactttgggaagagcggtttctccagttccccagtgagcatagtcgagaatgctaactgcagtggctgcaccaagattgcaacgagcaacatggatattgaggtcatcagtatcgaatgtgcaaagatttcgctggagccattggcgctggctattggaaaggctgcactgttgacccaagcaacgcttcagcagcacatcccgaacctcgtttggcagcttgtcccaatggagatcagcctcgaagccaaggcaaagctgccgaaggagttccttcttagcccagcatacgaccgtatgtgtgttggcctcctcacgaagctgtcgagccattgtgtgggttactccaccggagacaatcgatcccgccaatgatgcatactcatgaggaacgcccagcataagctctgtgacggcatgaagcaatgtttcagcaataatttgacagtttgcgctgatatcgagacgctcgtctaggagccctcccacggtgatggccaacttcaattggtttccagtactgcagctgagagctcgaatgccgggaccgagagagccagcagaaacaagctcgatgacaatgtcgcccttctcccatgatgagatggcggtgttgataatattcttggagcaggggaacgcctcttcgatcctaagttcttctctgcaagacaacatagcattcttgatttcagcaccaggatggacacctggattgagcctgaatcgggaatcggaaggaagcagtgaatagctttcgaagaaagtctggagctcttgctgggaccattcggggtccgaccagggtgtcgtaaacgcatggaaagtgcggccaagttccaccggagagtccactttgtgtggcatacccattttggcattccaaatcgagaggaaggcaacagtccaggtagcagagccgagtccaatgatctgcgagtacagcgactccggccgacagactttgagcgcgataccgattggcaatccgacacagataccaatgatgagaggtttcagcgcatgagggccagtgaagatctttgtgtattggtaccagatcaaaccagtgtaggcgagaacgtaggagaagaaaacaatcatgccttcaaccggagtttggaaggtccaaatgagggcagtagcaagcgcaagactccagacatgccacaagaggaatctgaaaaggacccgccagtataccttgcgtctcagttggatctcttgtttctgagcgagccgaatgtcttttgcagatctgacggaaataggagctttgctaccgagggcatcatggagctcctgggctttggtatcaataagcacggctccgatcaaatagtaggcaagggcgaagccaacagccattcgattagcattattcatctcagcagtgaacttaggatcaggcaacccgctagggaggagaccaaccatgcgattgccactcagcagttgtgcccatttgtcaagaagcgcaagcacaaagtacagaacaccacatcccatctctttgctcgattgacgccaatgaacaaatgcgttgtgcagacgaagacctttctgagagttacgcagggtgtcaagtgcgaccttggtttgaatattccagccagaactgaacggaatcggcctcggaacatctgcatggcgacaataccagtcgagaaggaaattggttgactcccagtcccgggcaagctctacgaccattttatctttggatgtcttggagaaagttccacgctttgtctgagccaagacgtccttaaacagtgcttctctagccagcttgagggcagccgggtcactcatgttcgcgaatactttctcgtcatcatttccataggcagtgagataccacttgcggatctcagtatcatcggtgcggcgcacggattggtaccaagtgacccattttgaggtaaccgaacgaagagagagcaagagcacaccaatgaagacatagataacggcgagatagatagccgagtcgtggccagtccaggtcgtgatgatcggcgacacgaataggatcggaatggacataatgattgacttgcgaccagacaagaaagacgtaccagggtaactgaagcttgcaagggaggcgaaagtcgagaagtaggttgtcagagcgactaggtagaggtagaagacgataccagcgcgaggacctcgaacacctgaaatggcaacgaagccgatcaagccagcggccacagtgaaggcaataccagcgatcaggcgaatgagaacgaacatgttcgctgctgcaaaagccatcgaaatgaggtagtacgggccaccacatgcaatccaggtaccaattacaccggaaagcagcagagcgatcatcagcgccatagttgcactgtcctgttcataatcagtcatggcagcagacagatagagcccacggccaatcaaggtaagcaagacaatatcaatcagagctggaatagcgaagacactcaagaatgtgaattgctggtatgcaggcataaccttaggcttatcatcggggttgacatcaatctgagctccggcgtaggatgtagcgagctccggagcaccgttaatccagtttggtggctgatggtctccatagtaagctctgaaccggtcggatagcaacttcccgaaaacgctgggagatacgtcgaagtatgcttcacatcgcgatccaagggcaaatgactctgcgaaggcggcggcctgatcggtatggctgttgaataggggattccgatcagtcacttctgtgtaaatctcatcgaaggctccctgtcttgcggcactaaaaagcgcaagagccatcatatccacgtatgcgtcaacggagccaccttgaagaagcgagcagagaccattggtaatggcggcaaggtcatcctcacggcggtaccgcaaaacatcggagagcacactgtcggcctgatggaaaagatcaagacagacatcgagagatgggtatgtgcatccttgatccaggtaccagttgatacgcgacctgatcaaatcatcaggaggggtagatttgctgagatacccaaccgtgttcagtgctttcaactgagcaaaagaaggagcatctaccagttgcttgcgaatgtatgcgcagatggctacagatagctcgctgtgagaatcggtcagagagaggtgctgcaagagaagtaggcgctcttcagggctgagaacatcgatatcttgtatcagtcgacggggaaggccagtatcgcgagacacgtcctgggaccaggttgcgaaggtcgcctcagcctcgaggcaaacatgccgagggaatccctttgccgagaggaaggtgtgaagaatagttccagccaggccttgcgcatttttggacacataaatctcgataccatcatgatccatatcgaaaacggcccaaaatcggacatcggagctcttgcgcagaccagaatctagacagagattcacgtgcaactgatcattggatgcccagttcgaaagttccttgatggtgttggccaaatgttctccatcctcagagagatccagagagtcatagaatttactcaaaaggactccaatactttggattttgggtttcgggacgggatgaagaagactgagagacttgagacgttgttgagattggacgatttctgcaaaggccagtggggtcgcgtctgaaccgagagggaagcaaccgagcgagttgtaggccagccctgacatggagatagagagaggactgccctgcgacttgacctgtgcaacccattcaggaggatcacgcaggcgaccagtcgggctatcgggggccttggagtcgtattccgatgacttcagtagcgcatcaatggcagggaaaagtggcttgagaatatcccagccaggcttgttatccggggaaggcattatgttcaggttgccacgccaggtatcatgagctttcatcatttctgcttccttcaaccaaccgaacgcgggaagaggttcgagagtcgcgacgttaagatccgcattgtgaagagcagcttcggtgccgatccaggtaattgcactgtaaaaaccgcaccattggatagacctgcgcactatggcattaggaataatgacattatcgtcgatggtttcccaggacatcacgacaaagtctctcatgcaagattcagaaacgaaagccttgagtgttggttggagtgcgaccatttggaaataatcccgcttttcgccttcaggcatgatgctagcgtttcgaatgaccaaacccgccacggcactgctctgaacggcctttcggtctttcaagaaatgcggtggctcagtttcgagatagactgccaggccgagaccgctgatggcctcgaggagctttctgcgagcggtaggacggagcacatcttcccaatttgcgaggagaacaccggaaaacgcggtatcatggaatccgcttgtgagcagttcctcgatcttttcgatgacggccaaggctgatggatttggaggaaggattttcccgaaatcaatacgtccgagtacccggctgcgctcgtgtctggaaatagctctggcgacacctgactggaatggatccacaaccaagacatcccattcttgcaaaagtctttcttgcgagacggtaggtgggttttcgaagcttcctaggtatactccgaagctcgtgggcttgcccgcgcacggacgtctctcgatcaagttgagttctcggttggctagctgggcgatacggttggatacactcgcagggaaggtgtctggtagcggtctcgactaaatagactggaattagtatatagagcagaggggaggagcttgtcggtgttcataccttatagtatttgataaatctccttcctccggaatatacaattgaggcagagccaatggcgactgtacatatcaacactccaatgtacatctaagggagatggtcagcatatctttctttgtttctcaacgagagcgccaaaggtcaagttgtaaagaggaccaggatcaacatacgaattgccaccaatgttctttcatgccattccagccaagaggatctggcttgaatggaagatattctaccatgacgtcgggaggttgagtcctcgactcgatgtgtctttgagcgcaatataagaggcacgaggttagaataaccggccaagtggagatgcgacttcaaatgcaaatgcttataatgacatgcttaaacgagtgactgctgtgttcagcgaaaagccaagatgtcgatgtcaagaaaagagagcaccggggagctcaagtgtcgacaaggtgataaggtaaaagattagtgggggaagaatggctaaagtgaatatccacttctccaagccgcatcagtcaaatacaacaagacaattttgcctcccaggatttcccttgttcaattgtcaggggcaggaaaaacggaaagaaaattaaaagaaaaaatgtgtatacggggtagcttcgcctcttttggaccgtttaggatagaaaacaagtgtctaggcggttagtgaggtagagatctctgaaaggcaaaaatagcacacactaaagttttcgaacgcaaaagaataagctaacagatgcacggctggctgaccgatggaacagacccggtggagccagcgtagtatggatagcagatatgttgccatgtgtgccaaagccatgcgactcatatcgtggcaattatactacccgatgggccttggctgtttctcccactgtgttccaagggtctaattgaacatatcatatcaagaatgaatatgtcgtgtttccctcgagatgtatcggatttcgcctagttagtttgtagggcagttatgcacgggctagagcatcatatcatttcagcgaacaaaactcgatgtcttggcaaaggattataattaaaataattaactcaaagacggaaaagaaaataaatagaaaagattagaatgcaaaaagaaaaggaaaagaagaaaagaaaaaagaaatacaggaaaaagaacttgaaacccgaaatcggacaatccatacggtgtatgaaccggtaaatgaaaattaccccgtatctgcaagaaaccacgtaattacaagtatccgagtagcccgaaataccgtatacgccatacacacgctgtaccccgtattcagctcagacatgcagtgccttgttcttccccttccccacatcaagttctggacttgaccagtctgttcccctgaaggtaaggttcgttcctcgggaataatgcaatgtgttgtcggatcttttagccctgctatggagttcttcatgtctcgcttaccttcaatctgcctagccttgcttttgtcttttcttattattatttttagcccaaagtcgaaacaagaagcgaaaacgagaagagatttctccatgtctcaaccaatccccaatagattccattcctgaaccgatctcaggccccccggaaaagattaaacctatcaacgccagatggagactcgtataaactggatttgccttgagatccatgcgagattactccgtagctccgggattaactaggcacaattggcgataggccttggattgaacctcccgttttactccacaaacaatatactataagagctgatgatcatgcacatgtgggtaaagagctgcaagctaattcattcgttcattatcttccgtattctattttcattttctcagctgtcagttgttaattgcagacctgcatactgtgtgaccttccccatctagaaataggtcaggatcgtcatggttgccgtgccagtctgggccttgaaggtcgcatgctactacgcatttataacatgcgacactgcccccggtgtttggcctgagaacaccccgactgtcattgcctatcatcctccggtctcgactccttctagtacttctagcagtactgctgaagtgagctccactgcggtcgctacttctacactctcgttcacttcctctgcctctgtcccggctctgtcctctatcgttactggcagtttgcccacagttgcaccgaccaccactgcagcctccaccttcgttactttcaccacttcgagctcaatcgtcgactctgcttcggcatcagtcactgtcactgtcccctccggttcttccagcgtcctgactcagagtgggtcgtcgtctgtttcatcggcctcttccagctctgctgtttcgtctgcctcaaccgttgttgccagcagctcggcttcttcttctcctgtttctagtgctacttcaagtgctagttcttcgtcaatcgtttcaccgtctgaaagttcttcagtcagctcgcccgcctcgtctactgttcccagcagcccggcttcttcatcgcttgtctcaagtgtcacttcttcatcggtagtttcatcttccgcaagctcttcggtcagctctacctcgaccgctgttcctagcagctcggcttcctcgtcagctgcttcaagtgctgcttcttcgccagcagtttcgtctcctggaagctcttccatcagctcagcctcaaccgctattcctagcagctcagcttcttcgtcacctgcttcaagtgctacttcttcctcggtgattacgccttccggaagctcttccgttagctcagtcgttgttcccagcagctcagcttcttcgtcacctgcttcaagtgctacttcttcctcggtgatttcgccttccggaagctcttccgttagttcaatcgctgttccaagcacctcggcttcgtctgcttcgagtgttgcttcttcgtcggcagtttcatctcctggaagctcttccatcagctcagcctcaaccgctgtttctagtagcttggcttcttcgtcagccgtctcaagtgctacttcttcgtcagttgtttcgtctgcatctgtttccacaagtgcttctttgactaccccaatcatgtcgtctaccctcatctcaatctcggcttctgcaaccgcaagtgccactccgcttagccatgctgccgttgcagctgaaattctgattattgccagagatgctgcctctgctggtgtggccagctctggtctcaatggatacggtatcccattctccactctgattgttccctctgctggtgtcgaacttcccgaactcaatggtaccgccggaggaaacttcggtggtattgtcgttgcctctgaagtcagctatgactatggtaccctgggcttccagagtgccctgaccaccgatcagtggaaccagctatatgcttaccagcttgaatatggtgtccgtatggtccaatacgatgtctacccgggtcccaactatggcgcatctgctatcggcggatgctgtgacggcgttgaacaacttatctccctcactgatactagtgaattccccacatctggtctgaagactggcgcaggtatcagcaccactggtctatggcactaccctgcgactatcagcaacaccacctcgaccaagcagtttgccgcgtttgcccccaccacaggcttcgagactgagagtgtcgccggtgtgatcaacgacttcgatggccgtcagcagatggccttcttcattggtttcgacactacctggagttctacatccagctacctgcagcacgcatggatcacctggattacccgcggtctgcacgccggataccgtcgtgtcaacctgaatacccagattgatgacatgttcctcgagactgatatttactcgcccgctggtaccaccttccgtattcgcgccgaggatttgaccaacattgcctcctggattgataccatcaatgccaagttgcccgctggcagttcttactttgttgaagtcggccacaacggtaacggaaacatcgagaacgcttccgatacctcggatgctggctgggatacttgcggagctgccatcgagtatgattcgcctttggacactcccctcgagtggatcaagcctcttggaactggcactgatctgtggcccgccacccctactgcttacgactgggaagctacttgcactgtcatggatgagctcctggcatggtggaccaccgaaagcaacctcaacaagttcggccacatctcccacactttcactcacgaggagcaggacaatgccacctacagcgatatctacaaggagatcagcttcaaccaggcttggctcaagcaggtcggtatcgacaaggccaccaagttcacttccaacggaatcattccccctgccatcactggtctgcacaatggcgatgcccttcaggcctggtgggataacggcattgttaactgtgttggtgacaacacccgctctgcccttctgaaccaggagaacgacatgtggcctcttttcacaaccgttgccaacaacggtttcgatggtatgcaggtcaaccctcgttgggcctctcgcatctactacaactgcgacactcctgactgcaccgtcgcggaatggattgccacctctgctggtgttggtggcttccaggacctcctggacatcgagaaggccgagactatgcgtcacttcttcggtctcttccacgatccttacatgttccaccaggccaatctccgcaacgctgatgttgaccccatcaccatcaacggtgttgctgagaagtactccattatgcaggcttgggttgagacccaggtccaggagttcatccgcctggctgaatggcccgtcgtcaccctcacccaccaggaggtaagataaatcctatccaatacgctacaattcgtttcatgtgctaaccttcatagatgtctgctgccttccttgcccgtttcaaccgtgacaagtgcggctactctttgagctacgccactagcaaccagaagatcactgccgtcactgtctctgccactggcaacacctgcactgaccctatcccggttactttccctgttgctcctaccagcaccctgggcttcgctaccgagcagctcggtgctgaccctctgaccgtctgggttgagctcactggctcccccgttactttcactctttccacccccatttccttttaggatgtttcaaagatgattgaccagtctgccttcatttgacaggtcgatgcactttgcatcttttggcttttgttgatcgtccatcgctctcattcatcttgtggatatctctttagatgtcaataatggtttttatatatgtgaaggaaaaaacagcccttgtctttctgttgatacgaatattgaatgtcctgtattttaataatgcctggaaatatcatgtatactatatgatatacaatgatgctttccgaatggtcttcatacttcagtagtgtacaatataaaattagggctcaatctgtgcagagtagtaaacatcattcttcgtaaaaagcaacacaagcacaagtcctcgcatcctcggtactactctccgacatgtcatctggcggtctggcggtgccatcaataattcgcgctgcaggtccggggtgacaaagtctgcaacggttatacgagccaagggatttcctgatccgactgatccggcgcaaggcatggaaaagacttccagcgcatttcgcacggtcatgcaccccataccccaaaccaagaaaacccaaaaaatatgatttccacggatgagactaagtccaaaatcaaatcaatcgatcgtggcaaaaacaaacatccatggaccccgtttactccatacggaccagcccaagcaccagaaagcacagtgtagaaagcaggtttagagcctaacttgtctcacaaaccactctatcaccccacccaaccgaggacgccatccgggcaatcgatctggtgccaagtacactcggaaaataaagatcgtgtctcagaagccggaggggtccggtggatgtaaactagtgtaaacgcaagtggctgctgtaaatgtctgagatataccggtacgcacagagtatattcgaaattctacctagatcgtattcctgcggggtgaaggttgtagggttggcatggggcaatgtgaccccgtcatcagggtccagacctacgctacagcggggaagcatagatgttgtattttgtatacgaggggaccaatgcagccgttgcataggaactactcgattgggtaacaaggaggctcaatactaattttggatccatggatggcaccatttcggtgatatccgcttgaatacggagaaggttcctgggcattaagccacccggtcacggatttaatgtgctttagtccgggctccgtactttggactttgtgctggggtcatgtagtgatcaagaataatgtatgaataatgtatgttgtatgtcatgtaaccctccctgcttggatgaatttgggttttggagctcattctgacttctgctgctactgttgctttcgttcttttattcctgactatccctagcagcggccggtgccaggggcaaatgttacgatagatagaatgcgctagaataaaaatcccttagcgtgtatgtattctaagcgagagatattgacagagtcaccatttgatgacttgtcaaacagcgaacactggaaacggttaagcgcgatcttggcaagggctcgaaatttctgtctcgggtgcaatatagaaacgagactaacgatctcgggacttcgtataaagtcccgtggacctgtttcggttagcgggtgtggcgtccagagatttgcgccaaagaaaaatcaggcgatcgggttacatctggactagcgccatcggttgtactttttctctggtagtctattttagcgtcgaaggtggagagagcgggtcatggaggacgattcaacaaaaaaaaagtccaattcgaaacatccaacatagaataggcaaacggggtaatagtaacaatagcattgcatgatattatgggttactaccagtgttgaatactcgaggatagatgcttcgttattaaactagatctgcacataagcgtcatgcagagaagatttcaaagcatcagatgatagcccaacaggtcggcactagggtttttaaagtgactgattatcgctgtcagaagtttgtccactttagttagggctagctcgatacataccggcatttagggggatatctcgggttggtatttgcaaacccgtcttacctcggattggtaattacggggataaaatacaacaataccattttcgtgacaaaaaaaactcaactccgatttcgcgattctagactttaacgctaaggggcttgccagcacatgcatctatccgcttggtttattggcaatgttctgggaacactggaagcgcagggactttcggtctcccctcgaatcctgatgctgtccactttgtttaatgtatacaacctacaacatatatggaaataaatagccagccttggcagaccgagacttcccttttttcccttcatctattttaggcgacagatcactctcttcatccatcttggcaatttaaaattggttgccaacccctaactaagcttccatgggttgccattatctcttctcgtatacggtagttcacttatagtgtacagtaagacgatatagatcgcctgatcacatgagcagatcagatcagtaggttccaccggatctttagttttcgccccttggacttttccagtggagtcctgaccgccctcgccctctatagccctttaggcatcctcgttttcctaccaattgatcaccacctcccttgcccgttcgagtattttcagggtcttccgtccattttctgccgcgatccaaggctgagctttgcttataacgtccaggtttttccgtaccctgggagatctccaaccagcgctctgggcccttgactttgagcttaaagatgcctatctcccgaattagtgcctgctgatcacttcgtctcttcttttccctccttggccttccccatacaccttcattatatacaactaccccgcgattttgggttatctcaaccttattacacactaaatttctctcgttttatctctcatttatctctcagttcacagtccaccttaatcggtgaaatgtcgtccaagacgggctggtgggcttggtccaccaagaagaaggtccttatccttggatctatcgctcttgtcatcattgctctaggtgtcggtctaggtgccggactaggagttggtcttcatcatggcgaaggcgatgataatgataacgacaacggcggttccggcacaggttccggaggcaccggttccaatacgacaacaccaacaaacacaaccgtgtggcagccagctgttggcaccaagtggcagattatactaaaggccgacgatggcgaaccagtcaccacctcagtggacgcgcccatctacgacattgatctgttcgacaacaacaaaaccgtcatcgccgctctccagaaaaagggtcgcaaagtgatctgctacttctctgccggctcgtacgagaactggcgtcctgacgccagcgactttctcgcctcagataagggcaagaacctcgacggatggcccggcgagaaatggctgaacgtctcgtcccccaacgtgcgcaaaatcatgcaggcgcgtctcgatatcgccgtgaccaaaggctgtgacggtgtcgaccctgacaacatcgacgggtacgacaacaccaacggacttgatctcaccgaggcccaggctatcgactatgtgaactggcttgctgcccagtcccacaagcgcggtctctccgttgggttgaagaacggcggaggcattatcgactctgtcattgataacatgcagtggtgcgtcaatgagcagtgtgctgagtacgaggagtgtgatacctatgcggccttcattgaggcggacaagcctgtcttccacatcgagtaccccaagggcgatagtaccaacaataacaagtccgtgacaaccagccaggcgaatgctgcttgtgatgccaacagcgctggcaatttttcgactgttatcaagaacatggacttggacaattgggttgaatactgcccttgaatattggatactgttcgtgaataccgcctgtttgaggccttgtgcagagtgggctcgtcatctaatttggagtttgtcattgcatgtataagtactagacgtgatactttcggcatcatcattcatagcttccatcatatttcagcgtgtattaattggtcttgagaggtgaaagaagtaaattggcaactagtcacaaagtacacgcctggacacccaagaacccctggaacgcactcgtcatgtcagcacatatttcacgaacagcaccttccctccgtgtcaaattcatcacataaattccatcaagaccacgccatcggctcaaattgccttcggatcacatcaccctcaatagacggcaatgaagtgcaccacacggcacagcaactcacaagcccaaagaagcgaaaccaaaaacgccattttgagaacacagcacgcccattacaatagtccagcccaacatgagcacataatcggcatgttctacctatttaagcccgctagcctcagaacagtcacccgacatcccgagttcccttcccgaggttttcccaagatagtactatgcgctgtctccgtactcagctcctcctcacccactctatcccagctcgcacctgctctgggcaccggctctaaataatcaccccatctcaaagcaacgaccagcagcgccatcgtcggcgactcctcttatttacagccactgcatacccataagcaatagtctgcagtggctgtggctgtggctactgcgattagtggaatattatctccgggtcttccgtgcgcccgggttattcatggcgtgacatgatggagagattgggcgaggttactccgtactttactttactcaggcctggcttttgtggcggatcagccatccgtcaatagcggttatttttctttttacttacaacacggggtatcggacgttgtttatggcggaagtgttgaaatacacggatacatatacgtccgacccgaataactagtatgtgcatgtaggtaacagggacttgattccagtcctattttttccctgcatcttatttcgccaccgtatgtataattagagactagtagttcgttgtttctagactctggagcaaacaaggcaattaattacaaatacgctcttgtctaattggcctcatgaaacaaatcgggcattttagcgcactgggcgggcatgggatttcccaatggagacggacgttagattggtcttggcggtcttggcacatgaatacatcggagcgggtcgaagcgctagattgctctgattggttaggtttgagagttcattcaatattcagttaagttcgggtcgagcccctggggaagtggatcatccggtaatttttcgatcgtgtttgtgtattgtggaaattttcgaagtttcattacatacatacatacgagagtgttgatatcgttatttacgggtattttatgtgtcaacaatcagccatcgagtttattttccgccattgatctgtttgaggctgtgctacttatggacatatcataactcaaaaatcctaatgggggatcccttgcataagacccctgtggctggaacttaagtcacacgtagcgtgctactatttgagataggtacgttgtactatttttcacaatgtgctatatttcataccaattgcgagaaagaaagccgaatagtccaggatccagaatccaaaatcaagaatctcctccgcaaaggcgcttatctctagcatcaaccacattttgactgggttcgcatagaaaaaatttgcatatcgcacggccgatctcggtacttggtactccgtactccgtcggtgaacacgaggatactacagctccccagtccccgacgctcactcccgacgggaataacaatatcaattggccagtaatacgctccctttcggcctgtttttttttcccctctccgaaactggaacccggtccaacccggccagaacccacgtgtaggtatactatacccgcctaccaataacgcgcgaaccttggaacctaacctgtctcgcgcgtggtgcagcagcaagaaccaagggcgctaagatcggctacccgagtggctcgcccagataatagatctaccccttgttcctgagtggctgggtatttgtacctgtgtgtatggaactatgtgcaccctccacttgtttacattgatgtctatattgtactccgctctgtgcaaatctctgcaacgcgacccagggctgctatattaaaactaacgggtggcttgtggcttggaagacgcaatgcctcgatttggtaatgggttatactaagcgaggatatatattcaagagatgactgccttcgacccatggttgaaccaaactaggcatgaatagcctcgattgaaatgcgcgatttgaatcggtggcttttggaaggaccaaggcgcgcgccatgcgagctgaacctcaaactcggatggagacatgtatggagacctggatggatatgctggcgcgaaccgttcggaatttatttgttcagattcggaccgtgtccacccatgcatgttcgtgtagctgatcaagccgcagccaaacccaccgttgttcattagttttcccacttttgtgctgttagcgcccccagcgatcgactagttctagtgccaataatgcaatttattcagatctagctcctatggagtcgaacggccatggaagacaggactgattggctatttctctacagttttagtcagttctccccagcggctaccgggcgcaccgtagccaagagaggggatcgaaaaaaaaaaaaaaaaacctccgaaatacccggccatgccacgagctacgtatgtagttagtggcttccgccaccggcgctcgggttcaggggtatggctggagttttacaggtacggctgaagagcaagggtggggtgggcaggacggtttcccaaaactgcttctcggaccgagctaccagggaagaacctagtttctccggaggcggagatgcacgcaaaatcatctctaggcagaggatgaatattgctcgtcactgtggtattgtacattgcgccggggaccggggcgggggacggtggaaaggttcattgaaattgaaattgtcagccatgttgtcattgatgtaacaacatacgacagcatggttcctggaacatgaccccgttggtataggacaggtcgggtttggaattcggtatagccgcagttgcacacgttaaacctgcagacggagccctctgtacgttgctcatgttccaacgcagcgttgtatccggggactgagtttgccctatgtatagcgatgatctaactatgccaacggtaaatgctaatacccgacgtctgttgtctagtctgtctcactactgtttcagtccttggtctctttacaccatctgagacgattacgttggcttatattaatagctcagttctgtctcaagatgttccagttgaatatatcccaaacttgagtaaagcacgatgtccctcgttaattgaaacgttgtgtgttgcagggttattttgggagtatttccgggcttggatggcattggttggcctacaagacgccatatgcatgcctcatctcatctcatagatcgatcggatgggcggtaactcagacaatattccaaagaatcgaatggtctaaatcgagatccagaaaaggaaggcgtttgcatttccttgttgtcatgctgtcatgttgtaaacgttgtcaacattgaagttaaatcaagccacatcaggttgagccacgtttaacctatacggagcactctatgcctcgtatcaagctggccctacaactagaacccactctcggattttaatatatccctatactccgtgatccaaccatacttttgcgttgccacatgtttcaattgacaggtacttgattagtggggtttagttgtatccatggtattgtggtattctactcttggcgaaaggccgaaaggaaaagaaacagaaaaataccacaatacatactggtaatgtattacccacctgactccaccttgacctaaaaagtatagctcagctcacttcaaacaaagacggcttgaaaggatagacggggaaagagaaaacttttattagatggactaaaatgtggtctgaaaaccaactcgtagaatcattaaaccaaatgagtgaaaacatgctagctatccccaaaaaatatgtgcacatactcgcttgatccaatttacatcaccagtgcacatgaactaaagcaagtaatccaaagtagaaatccaaatcctaagctgccatcaggtcgacgaactcagtccacttagacccaaaggaggcataatagttcgtgctcagatgggtgatgtagatctcatccgcgacctttcgcacctgcttgaccagactgcgaagatccttgccctcgaccgactcaggcaccgagtggacgatggcgcaaagttgggtacgattgctgtccgagatgctgctgaacagcttagcgccttgccgttcccggaacgtgctgtaggcggcttcgaacacaacggttgaatcagctgtagccaggtaccgagaatccgggacagcgccggggttatggacaacctgatagttttcgttagctcaatggacttcgcctatgtatcccagatggggaacacatggtgatgcaggccggggtggaatatgcggcgttggaatagaattcaatagagccatagtttggcttgtgcatggcccgacgggagggaaaacggaaaaacagataaaacaaataaagaaacgcggatatagggcgacgatgatgcgagacaggggtggtatggtatggggcagtccataagtgtaaagtaaaaacattacagtactcacaaattgatcagggccaagagccttgagacccttaacgaaatctgtgagcccttgcagatacgtcaaggtttgagcttcgtattgttgaggagtttcatcgaagaagattccgcgaaccgcaaggttggggtcggaggaattagtcggccagtccgcataggtctgaatatccttgcgaacctcagaagcattgcgctttccataggaggtatacacatagcccaacacccgcacattgtcgtacgcagtgagtttggggatctcgcgcgtgtaattgccatccgggagagagtcagggccgggaccatttcctggattgattacgacggtaaagttgacatcggggtgggcggatatcctgtggcgttcagcgactgtttttctgtatttttcctttcttttctaatttgtatataacggcgcagcataatgtggctggctaccaggatagcaatttggggagagaaaagaaaggataaaaagggtttagaaacatacacattttccagcggagcccacgcctcaggagcagggtatacgtagagtggaacgaacaccttcgccttcggacccatgctatttttcttgtggagggtagtgaccacaacggaggggacaacggcgacaataatcacaatcaggaccacaattgccaagatgaaacgagacaacttcgacttcaggcacgtccggttgctcacgtgtttctcagtagacataatgggggatttatagagagaaagttgaaaagaatgaaagtggattcgcgaacagcgccggttacatatgaacgtgaatttttcagagcatggctgtctgaaaaaaaaaccaaaatggaaacaggttgatcaacacgacctaaggcttggaccctacggtcgatggatctggggcgaccagatgcagtaaggtgtcttggccaagacgtcgaaaaaagaaccgaaatagagcaaaatcgaaagaaaagatttaataaagaaaaagcgcgaaagaataaagaaatacaagaataattccattattatactagctcgagaagccctgacgtactggtacggagcacggagtaaagatagaggcagttagggcatgcgaatgatatcccaaggtccagccgcatgtctggcccaccaaggggcatgcctggttctgttccagttcattgtgccccctcttgcactcgctttgtgcttttttttttttttatttccgtttatacttaggtccttttctttctttttccttttatttttgccgggggcccgtgctgaatcctcattcgtcaaggaagatggcataatatatgaactcaaacagaggatccgatcgagcaacgcaggtacctcgcttgttttgtataaaaccttggtggagggcccaccgaagaatcgggatatcttagtctggtcatataaaaacatagatcattttctctctttgttcgcagcgatagcataccttccaaggttacctggcattcatcgtcaacttcccatcatgattgctccaacatcattctcctcgtcgagatccgacagtcctcataggtctgatgcaagcagtcctgtgcagtctcccatcgccctggatacacctgtaacagaggctggagacccattcgacaatctccatgacttgttgcgcagagtccctttccagagccacattctggtcactggtggcctcggtttcattggtagtcacaccacgcttgagctgctcaaggcaaactataacgtcattgtgatcgacaatcttagcaatgcattcgagaatgtgttcgatcgtatcagcctcttggccaagaagcaccacgagaggaatggaacgaagatgccatctctgcggttgcatgcacacgattatcgtgacgccaaagctcttcagccgctgcttgaggagtaccgcctcccatcccggtggggaactcccaagtcaagaatcgccggagtcattcacttcgcagcctataaagccgtcgaggagagcattcggaagccactgaagtattactccaacaatgtcagcgggcttgtcgactttgcctcaacactcggagacttcggcatcaagaccttcatcttctcctcctccgccaccgtatacggcaccctcgccacctccggtcttccattgaaagaagaactgtgtgttcacaaggaagaggtgtacacagatcacaaaggcacacaacagtccatccagcctggatgcacaggcatcaccaacccatacggacgcacaaaatggatgtgtgaaaccatcctcgccgacttggccgcatcagaccccgaatggaccattgttgcactccgctacttcaaccccgttggctgtgattcttccggtcttttgggcgaagacccaagacaggcaccaacaaacctgcttcccgtcgttgtcaaggtcatgaccggccagtacgccgagctctcgatgttcggtacagactgggaaacagaggatggcactgccgtccgtgacttcatccacgtcagtgatctggctcgtgggcatattgccgcgctcagctcggccaacgagggcaaattgacagaaaatttccgcacgttcaacctcggaactggaaagggaaattccgtcatggatgtggtcagcaccatggagtctgttatcgagaagcccattcctcgccgtgccgcgcctcgtcgcgaaggtgatgttggagcttgcgttgcggtcgtcgaccgctcgacggaagagctccaatggaagacagaaaagagcttgaaggacgcctgccaggacatctgcaacttcttggatgtcagtggtctgtcttcatagcgcgttcctcaaaactcctggtccgatatggtcgttttttttcttttttttttgcttttcgcttgttcctaatacctgctcaccgaacaatagcccttacgaggcatgtgtttcagtataatgattgtctgtttttctgtttgtttagcatgtgcatagagttgcatgactcgccgagtattctcggtcggtctctgtgatattttcccccttgggtgtacagagtcatttacatacgtcgctttgttgctatattcgaattgacaaaagttcccatttgccatttgatccttgaattgtacaggttctccgtgaatactgctagtcgagaactaatcattagttgttgacaggatatggtgcaaagatgtgtgatctcatgtgccagtacactttacacaaccggtttggacgtctggataggagatttcggggtttgcaggagacggaggatattaatttgcctcgcatgtagtctatacacgggctagatccttgtagcaagaaatgaagctgccctacgtcgttgaccatatttgttgatgcatcacgtgactgatctcggtcttggcatcaaatatggccgcagttttctgcgacagccttgtccgcgcgtgtgttattgcatcttcaatgcaattgggatttcttgtcgcctaggaccttctattgaacgtttcaataccgtcctattctattccctgtcttctctgattgattcgccacaatgatctgcaaaagctgccgcacgacaatgctgtcccgattcaaccagcagccagtgatccggacggcttcagcatgtgcgcgccagctgcctctggttcgcagccaattccgctcatacagcagtgacaacaacccacctgtggctgctcctccttccccgtccgcccccagacaacccacggtcggcgacctcacaactccgtccgccatctcctccgctacccccggcatttctcagcctctgagcacgcccgaaggtgtccacactgatgtccaccccggagcttccacacatcccacttccgtgcgcccaccgagcagctgcccagccggaaccaaactgaatggactcaactacttcaagaacaagccggatgtcttcgccaaggaggattccgagtacccagattggctatggaacctcttgggagattccagcaaggaaaagactaagcagggtggtgttgacccaagcagtaagatacctcctagaaatcccgtttgcctatgatgcttaccccgtcgcagccttgaacaagaaacaacgaaagcgttacgacaagaagctggccgctcgtactggccccctcgctgctaagatccccgcccaccacaacgctcacgatatcacccccgcaccctacaaccgcgacgcaccttcagcggatgccatggccgatgccaccgagggctttgagcggcgttcggaaattatcaggagtgcccgcgacgccagacggaaggccatcaaggagtccaactttctgcgcggtctttgagctgttttgtatcagttcgagtggaagggatttactctgcttgttggggttgtgtcgcaggcgctcagaaccacctcgattttgcattggatattggatagcctggacttttcggagcacccgggatgtattattacattgatttctttttcgattgtgctatatatcaatgatattgtctcagattaagttcgcctcggagtaccccgaacagccacctctgtctcagaaagtcgagatacataatctattgggaaaccggccactccttctcctccccttgcccttcaagccaggggagacaagcttcataaaatgctttcaactccccatccccaagagcaagaatcttctcaaaggtaccctggtcaaagcgctcatagaaacccaaaagtgaagcgagaataatatccgcatagccagccttctcaccctccaaaaacggccccttcttcccctccttacccttcagcatcttaaccagtgttcccatctccttctcgataagctgccatagcgcaagcaactccgcctcacccgtcggcctgacctcagaaagcggcttcccgaacgccgcggagcgcgtccggataaagtactcccgtccacgctcatccagtccagatggaactctgggaacgatcagcgacttggtactcggtgcgatcagctccacgatcttgtccacggcgaccacgagcgagtaacttgcgtcgccggaggggaagagcgggggcgacgggtacagcttgtcggtgtacagggcgatcgcctcggattccattagcacgccgtcttcgttgctggtaattgatcccttgtggctgattgccggtagtgtgtagggtgtcgttgacttggcgggtgggacgccatgcgccttgagtaaaggtgcgatatccgggtatgagacccagctttgggtgtaggggatacccttgaagttaaggaccattctggtccggagagttctgggagaccatgacttggaagtgcctggttagattagttatttgtctgtctgcagtgagtcatcgtctggtccgtacccggtaggtctgataggagatcgaagaaatggattttggattcagtcattgtgtaattgtagattttgtatctggtttagagttgaagtcgtgctttaaggttgaagtcgagttgttgagttgttgagctgttgagtatacatgtagttctatttatacagccctggagacgtcggggcgggggtttgatttatcagctgaaattctttggaagcacagaaaagaatagaagctgatcaagaggctttcctttcgttaatacgctgtgagtatactttcatcgaggctaagctgcgagaatgaaggtagtgttgaataaattcatatttcatatccaactaatagatacatcaagtaattcgaataccacagccaaaagtctcacttcatatccacgatatagagagcgccacgttggcggggagctggagcgcacgggtcacatggggattttctcccgacatcaacggtatgttgtctctaacacgacgtagttcataaatccaattctccatagaaatccacaagtactccagctaagcggggcaacctttgccaacaagcccgcccctccagtcactacccaacatccataaggttgcatctcctatacaacatacgacatactccctgctggaaaagaaagctcactgacaatataccagtgaaagatggagcatgtcgaagttctcgtggatcgtgctaaacagctagtactccacgagccacccagggcacaaacacacacacacaccgtggacaaattccacccatctttggacgatcatatccaggagatctacaagtctgtcaatgcatatgctccgactacagactatttcctcaaggaaatgcagcatgacaataccgtcgcagattctcctgagcccgtcaccgatgctttggcttcgctggatgcatttcgtgagtacatgaaaggtgtgaacgcgtctgcgatgggaccagaagaagccctggatctttccgcgcctctttcggattactttatctcgtcaagccacaacacttatttgacgggtaatcagctgtacagcgacgctgctgctagtgcctatacatctgtgagttgatggttgcagaatagtcataccattttgatccatggatgttatgatctccaggacctggaattgaaaatttactcatgttccaacaggtcctcctccgcggctgcagatccgtcgagattgatgtatgggatggggaattggacaccccaagctcaagtgacggcgggataggcagtgacagtagcagtgattcagagactgaaaaggggaagggtatgaggagcaaattgaaagaaaagatgacgggccggaaaagtggccaggagaaaattggtaaaggacataaaaaatccttatcctccaaattggaagcgaaacttgatggcgtccttcgtcgcaaatctgccaagtcgcccccgcggccattggacgaagacaccgcgacgagccatatgcctattccggttgagcctcgtgtcatgcatggccatactctaaccaaggggaccacattccgtgaaatctgctatgcaattcgtgacagtgcatttgttgccagtgatcttccagtggttattagtctcgaggtacatgcgtctctcgagcaacaacagacgatggttgacatcatgtcggaggcgtggaaaggattgctcgtggaggctcctccggatggagagaagcttcccttgctagctgagctgaggcggaagattttgatcaagagcaaaggtgtcccgctccatggcgaggacaagaaacccgaaggagaacctctgacgccgcagaattccgaggaaaagtccccgggacaacatccgccgaagcctccaaaggttcttgaggctctggccgagatggctgtttatactcgcgcctatcatttcagtcatttcgatcaaccaggtatgtatcattgtagatatggtcatgaaggcaatgctaactgaccaacagaggctaaattccctcatcatgtgttctcgctgtccgagaaagcagcgcgagaagcccatgccaaccatcgcgaggccttgttcgagcacaaccgaacatctctgatgcgtatctacccgtatgcattccgaatcaactcatcgaaccttgatccaacattctactggcgacgtggcgctcagctagtagcgttgaactggcaaaagccggacaaaggcatgatgcttaaccacggaatgtttgttggaacccacggctggcgactgaagccctttggctaccgcagcagcaattccccgatagatatcatcgtgcgccacaacttaaccctctcaatcgaagtattcgccgcgcaaggcctctctctcccaccgggcgaccacagcgagaagggattcaaaccctatgtgaactgccagctgcacgtcgaagaaccggacggcgacatcaccccgggccaggacgatgccagctccgacacggagaaaagcagctacaggcggtgcacgaagagttccgtaggttgcaacccggacttcaagggccagagattggagttcccgaccgtgatgggaatcatcgaggagctgagtttcctacggttagtttttcttttctccgagattcccccttgctgcttctctacccctcatcacattcgttttcaagtatgcaggcataaaacctgcattgtgatacccgagaatatatgcactttcccgcatcacataatcatgacgagtgggcttgggatttgcttcttccagacttcccacttggtaacgttatgcattatgcactatccactattgggcttagggttagcagggcgacctgtggctttccgcagaatcagctctacggagtcctatcatgcataccaccctatgcgttccactatctacaaacaagaaactaactcgggtctgccttcctttcttaggttcaaaatcaaagacgacgaaatcggtcgggatgcattagctgcgtgggcttgcgtccggcttgaccggctgcgggagggttatcggctgattcatctccatgattatgccggcgagaaggctggcgggatcttgctggttaatattgtgaagcgggttacttgactgcccagatgacgttgtcaccgtgtatttatttgtttagattgtcggtagtatagcgataaagtatatcacaaattctggaattctatattttacggaacagaaggccatcgaaggaaacacagcgccaggaccgccgagtatcttcaagcagggtttgggcagcatgtcgtacagcgcacctacgcattaggagcatgcggagcaagaaaatgtagcaggaaggcaggccgatatctgataaatgtgacaagtccttcgacatgtgtatcacaaactcatcccattcattttgacatgaccccaaacggcaggctacatattaggatcgctaccgaagtgcaatctgcccgtcagcatgcatatctgactcgagaacgtcacacagaagcaatgacacttcggcacttcggcttttgaactcttctcttctaacttcgagaactgcattgcagagctaaggcgcaacaatttcgaagacagaaacaactagtctcggccttacaatttctcgccaagggtgtctgaataaaggcataaaggccgagcgcggggtagatcatgtcttactttagctaggcggctccgttggcatcgaagtgggtgcatggagaggtctgtaggctgcctgcagtgtcgtgctggcggtatatatcacgttagaggattcaattcttagccgcatgatatgcattgtgccgatgccgcgcatgggtaccattccaatatgttggtttccggaagagcggctactgtagatgtgcatatcgcaatccgtgacttgggcgatatctaaatcgggttcatttactaggttcgctatgtacgagaagaagtagcggtgacggatcagacagactcgggcgtaatggtgatgcatagaaacgtggggtagttgtccagccctggacttcgaagcatttggcctattgatagtatagtacgtgggtggaaaaaatggtcttgcatgctgcgagccatagccccaaccgtggggttcgtaccagaggaggatcggtgagaccgagagtcaaatcactaggtacaatatcaccttagaagggtcaaggcgccaagttacatgcatcagattgatcaacatggctagtggggactagcagataagtcaagttgaccggtaaatcctccgataaagttgtggccaaagagggtcacacgtcggctgaaggatcgcaatatgagacgtctacggttgtcctccgattgcccagggcctcaacgaatacggagtctggaatagtcggtgactcaacgatagaactcgacatggttcttcctaagcaaagtacaatttgtcatctgacagatcctggtgcaggggttcatgcgtcacttccacaaaatttgcatgcagaacagagtgataatcggcctttggcgttggatcaaacgggctagaacggtacggccaatgatcggaggagatcgtctttttaaggaatggagggaacccacgttgaaggtcattggccaatcacagcatgcctcctaccgaagatgaccgaacactagccctatctgggatctgccatcgttctggggttgatacgtcaactcttgaatgtgttgagaagttgcaatttcctcgtctccccccttttgcttcgaagtatcggtgaattgatgcaagttgccgagacccgctacactcatttctttgtctgatttctttggatcgctgatcccttagccttttggacgaaaacatggtgaactcacaaggccggaggcctcgggaagtaccgacgaagccgctgtgattggccttggtaggctagtggcgtacaaaagaggatcatgatgacccttttttttgggcacaggtacctgtgcaaaaaggcaagcccgtcaagacgaacatccatctactgttactggctgatatcattgggccaaacaaagaagtgactgccaggtaagtttttgatattaaatttgagattacaatattattatttccatattaattatttttacctgattagccaatgtgaactagatctattcttctctttcgccttttcccttgctttccaggccttataaggacccctcctcgtcctgttccatggccttgtattcagacttcaacctaagacagtcctgaacatcctcgggcttcggcaaagaactctactcacaccttctctcctcgacgtctatccaagcaacatgtgttccttcaccaaatgtgctgcaccagtgtgctctaactccgctgtcatcaccaaggtccgtacaccttactcctatatcgatgtggtacttccagcacatttacgaatatactaactatcaacagatgcctggtgtgcgatgccccaattgccaagcacaggggaaagaagtctgggttatcccaggcaagaactgtcacatctgccacaccccttgtggttgataacttcgaggtcctgtgctgcacatctatgggggaaaagaccgtgcagtcaaatctgcccatgctgtccggatatgatctgattccacacttcaacttcatacactctcccggtcatatgggcattccctcttgaatctgaaggatgaattcaatacgtctaacacacgaaaggcctgcgaataccttggagattgatacacttatttgggactgggtgaaccccaggtggaaggcgcaaaatgttctgtcgtggtgtttttgttactattttctttagcgttttctgataatgagatatgacaattcttgattttggcttttcttcactagacgaaatggtgctgttcttgccatcgggccgagtagatcagacagactgaagtgccactcaggtaaactttttaagtacaatctagaagtagtaggtagcccacgtgggagttcccgggttatatgacatcattcactcatagcgacaagagtgcacgcacagagtaactctacatatatacgggaatatagctatgatacatatttgactccctctggtgtataagcctttgtaagctgacgcaggaaagcaagatgaggttctatatgccactactcctctaagcactatccctataaagtcatgctaagactgtacttcggctgcaataaagcggcaagagatacaccccaaaacagaaaagaacagggtgcgtgacctggaaatttatccggtccatacgtatccatcgccttcaacttccatctcatccacaaagaaagcaacattacaaatccaagccagatcaccatgacggaaaagtatcccatcggcacacgcaccgagagcgagcgtctcgtccgcgagtgggggtttcgacatatcttcacctggacggatggaaggtacgtatagttttttgttagaatcgatacatgatacacccaaaatgaaacccagctggactacggcagcaaaacgttctctcatttgatgtatgcattgatgctgactttattcagcaacgcccattattccccgcactcgcatggcggtctgacgacacatcttattcgtcgggggtctctgactatcgcataccctgatgataatgcggagcataatggggaagctgaaaaggtgacgtttcgagttggggagagggttgatgttcctgctgggaaggttcatgaggtttggattggggatgaggggtgtgagtatgtgattggagagtagaaggtgacttttgcttttactataaccattgtttctactgattcggaaattcgttgataaatgttgtgacattatgccgataagctcagctcattctattctaggtattgaatattttttaagtctacctgtgccagacaatgtagtcgtgtctctagtgcaagaatcggaaatcaagtctgtacgggcattagtactcagttgcacagcaggagacaacttgaaacatacctcttgtttccaagatccttgttttcaacgacgtatcgtgagcgctcttcgctggacattttgtcccagacagcggcattttgtctagaagggaatattagcaaaactattggatctcacagtacgggctgacatacttgttacgccacacgtagtaaaccttggcaaggatgaatatcgccatgctccacaccgaaagagcaataaggaccttattaccggtgtggtagtacggcttatccggggtacggtagacctatgtgatggttagttatgaagactcgagaacaaggaaccggaaagactcacgttgttaccaatgatgttactagcctgcaccatcatgttgtagatagcagtagcaaccgttcgcgtcctcacagagcctgcattgcgggatgtaattgcgacgataatcgcgtgcacgtaaggcataccaatcaacaagatcagcagaacccaacgcacccaaggactagcactctcagatacagtctccaacgcgatcaacaggaccatagcccaaatctcagcaccgacgccaagcagcagtcgctgattgaaccgctcggaagcccaagtccacaatagcagattgataatgaagatcacataggccgggatggtgagcaggttggtgttgaaagtactgaaaccaagcgacttcagttccagactgatgtacgacgtagccggtgtgctggggatcatccaggtcaggccaagcaggtagatgagccacatgtcgtagtccttcagggcctgccagagcagcttgggagtcacggcctggcgattgtgcatggttcccttactcggatcatcgcgcaggacacggttgaccatgattttctcttcgtgctcgttgaaccagcccttcttaccgcggaaccggcctgcggtctgtgttggcgagggcggcatatagaatgcagcgacgataccgatcagtccggtgatacaaccctccagggcgaacaagtatcgccagccgccggtgccgtccgattggcgaatgtggaggaagccaaatgcgaggaaagcgctgacaatcgcggtggcttcgtatgtcatccagaagtagctgagtcggataggcagctccttggacttgtaccagaacgataggaagagaatggtgtcggggatgaagccaccctcgaggagaccgagcatggcgcgggtcgtgaagaatccggctctgttgtgcataaatgcctggcatgaggcgatgagactccagctgatcatttgcactggaatccagcgatcggggccgacccattttgaaatgagctgagagggcagctcggcgaagaggaatgttaggtagaagattgtttggccggtgttgtagtcgtttgtggtcatgcctagatcgtctagcatgttgtctgacgtggcctggacgatgtttccacggtctagttggagcgcaaagaaagtcatacaggcaaatgtgcaaatgcgccaatcaatctgcgaagggtcagttacttgaacagaatacgggagagttcagtaacccatacctttctgacaatggctttctcttcttcctctgtccactcaaagtccgggtcccagcgatgggcaccctcatattcaggaatgggcttgtagaaccgcgggtcctcggttgtatcaaaagcacagtcggtctgcttggcacgagggctgtcatacgtcgacgaagacgaagactctgcggataagactttctgggtaggcttagagtcaataggcccggcatcggatgccgtcttattggcgtcttcaaccgtcatctcgtatgggattggaagtgagattacggatggagaaaagaagcattgcttgggctgggcatttactcatataagggaagactcatacgtttatttatcacgccatatttggcagatgtttcgctttggcctgtgcaggatgtggaccaggcgaaaaggtaaaagtcacaacatcgagggcagaaagttgtggaactgcgatgatcctgggcgatttagagtcaattagggttgacgagattggctaggttggctcggttgacttagggaggcctagcctggaactcagaagggcactctacaggatagatagggtagacggggaaagtttccagatccaagagatttgttgaagaaaaacagacggaaaggcgacgttggcttgaatcacgcaagtgtagtgggattgacgttagagtcaacgagttagcggagtcaaagtcagcaggggtctcgcagaatgaacctgtttcatgcagatcttcatgaatgcgagttagcgttgaataataagtattctacgaactcttgtatgtattcacgacaacctatggtgcctctacgccgtaccctaagtcccttacatgttccatatctagaacattgactaactatacaactataactatggagataatataactcctaactataataaatagaaaatatcgcgccaagccagttgtatatgacgccatcagcagcgtatctcgcgtactcccacagcgcaacggtcgactcgttttcttcagatcacggcaattggcaatgcacgcacgcaattcggctatcacgtcattcccaatgcgacgcttatctcgtatacatacaataagagtacgtacctcgaacctcctcggctcgctcgctaaattgattgtatgataacacaaagttgacacttttctgattgtcccgcaaaaaccgcaaaaccccgcaatgatggcgcaattcgtgtgctcggtttgctggtgccgaaatagatatatattgccggtgtaaacccactagaaaagatgaagaaacatatctgatccgcagaggcaacatacacatacctcgcaaactcaaacatggctccctccctcactgagacagtaggccttcgcgccccgcctgttgcgcttccgctcaaggcggacggtggtttcaacaaggagaacttgatcggctacaagattgaaaaggatgttgagattaagggcacagacaaggtggctcctgtatcttatccggaatatctgcctgtttgggacaacgagacagaaaggtatattggccttgatgatggcttcctaggaataccatatctaatagacatctagatatcctcctctgacgccctttgagcactacgaccacggcaaagacgccgacccctctttctcagaactgcttcccgagggagtccaagtcgaccagctcactcccttcattggctctgagatccacggcgtgcaactaagccaactctccgacaagggcaaggatcaattggctctgtatgttgcacagcgacgagtcgtcggtacgtgacagcccttttttccatctccatctccaagcacggatctaacaaaccatccagccttccgcgaccaagacttcgcatccctaccgattcaaaaggccgtcgactatgccggctactttggccgacaccacatccaccagacctccggtgcccccaagggattcccagagatccacctcgtcttccgcggtgccgacgaccgcactggcgagaccttcctgaagcagcgcaccaacactatcacatggcactcggacgtcaccttcgagaagcagccccccggcacaacattcctgtatgcgctcgacggccccaccaccggcggcgacaccctcttcgccgacatggtccaggcatacaagcgtctgtcgcctggcttccgggaacgtctccacggattgaaggccgtgcactccggcctcgagcagatccacgctagtttgaacggtggtggtattgcccgccgtgatcctgtttcatcggagcaccccattgttcgcactcaccccgttactggcgagaaggcgctttacgtgaacccccagtgtaagtctgtctcgacacttttgaatgattgggaaagctgacatgtcgcatagtcactcgttacattgttggatacaagaaggaggaatccgataaccttctcaagttcctgtacgaccacattgccttgtcgcaggatcttcaggctcgtattcgctggaaggctggtactgttgtcgtttgggatgtaagttacagcctcagcctattctttcaatgagaacaaaagctaaccttcgcagaaccgtgtggcttgccactctgccgttttcgactgggaggatggccagcgccgacacattgctcgtctcacaccccaggccgaggctccctatgagacaccctttgaaggttagatggggcgctggaagccttcgaatttaaaataacacgtcgctatgataatcccacaaattgagaagaacatcaatgaataatttgaatatcatgcttgcattatcagcgtagacctgtacaaacatagtaatacgtcggtaatctctcttcctctgtgccatacatacaaaaacccaacaactcaagccttctcgcgcctgaaccgactcaaaagcccaacatgccactcgttaaaacgcctagcagagagcgggagcatctcgttactcttagtcaacgcctgcgacatggcttcaaagatcatagacggcaactccaactcttccaccgacaacggcgaaggattcccgatttccggatggagcagctcgtccacatcaggagcctcttggtagaacaccttcatcgcttgctgggccatgatactatcgcctgcgctggaattcgagtatcgcatgtctgggttgaagacccacagctgtcaagtagaatatccgttagtgtcatttctagaatttgatatggctcaaattcgggagcgaataggaatggaatagaatatcacctaccacgagaccgctcttctggccacaatgaacgacgaatcgtcgggcgctttctctctcgatcaattcgaggagctgtgcagcgacgattgtttctgtcgggtggacctcccactttgtaatgtctgcatcgctggatgaattcgtgttcagggatacgttggctttcagaagtcgccatcccttggcggttggatcttccatgccgataatggaattgcagtttgtgcagtcgagggttcgttgtggtgagagtttaatgttcgctttgtgctcttcatcattgccctggattgcatgcttgtcagtacgttgtacctgaaacgcgaaatgaactattgcgtcgaataatacttgtaaatgaaggaaaaagcattgcattcaaggtcaaggttatatagagcacatcatgcaaggaaaaataatatatgtaactctggtaatcacgcccgctccactgcttagatagccggcgctgaaaatagagaacaccctgagtcgcagaacaggaaaaagcggctcacacaagtccagtatcgcaaacgaaaagagcgaaatccatctggttagagaggataactaccccccgaatttgtgatcctgttcctgtgagagtaccaccttcgcttgaattgcagtacacaaggtgcatttcgtccatcttgggcaattgtatcggaggccaccccactgataactgagtggtccccttctaagttgcccggttctggggataaaaagggggaaatgatgatgggaagaagaggggatgtataaatcttacctttctcaatcctatgcagtctgtttcagcaaggaggaaagtagcaacatcaacaaagaccgtcccggaaacagccacaacgtggctatccgcaccataccctttagtctgtgcggtttggtcctcaatctcgagcgcagtgtctttctcctctttctcgtgatctgcatgggggtcaggtttgtggcaatgccagaaatccatcatttcagcccagttcccacttggaaggtctttccagatccaccccggggtagttccctgattaaccgactcggatattagcgagggatcaagaaaaacctgttcacactctcgacaacgaatacgagtcgaagacgacatttcatctgctgtccagggtgtgaattcatcaattagttcatcccgtggcgccagcgcctcgtcattgggatcgacctgcatgcggaaggaataatcatggctggggttcctggtgccaccgggatagttggtgctactggaatccctgatgccactggaattcctggtgcgactgggatccctggtatcactgggttccgatttcggtactggcccaatgggtgtttccaacacacgccgggatgcggcgctaacgcgcgcgggcagtttgattgtttctgtgacatgtttaaatggttctggtagggagactgtgactgcttttcttgattctgaaagttggatatctggtcgaattccgtcaaattgtgttgtctcgggaagtgacacgtaaagagttatctggcggatgtttggtagaaattctgcgtgtagatagagggggatatcggcatcctgcattgcagatgttgtacaagctcgaatgtgtgccagacagggatggtgcttgatgccccgtcaaaaggataagacgagagagggtgagcaacaggggtgattatttagcaatcatgtggagctggagtttctgactgtctaaggccatgagaaacatgtcgcgcttagattatttggacgttaactacgccgcagtggtggatgtcatgaccgcgtttgtcaaatgcaaacaatgcaaacaaccttgggtaccttgggagccaacatctacacgtgaccccatgtatcgcttcgtcgaaatgaagaaacgatcatctatcaatttattttcttcgattattcattaaatcgtacataaatttgagttaagtagagtatgaacaaagcctacagatcatatccgacaaaattccctccccaacacttgaactcagtcgcaaatcgcacagcagccttcaagaagaagctatcagaatcgccccaagtcgaggccagttccttcagtgctcgagtggtcttgacaaagtacacatcggatgaaaattcacccttgacagctttctcggcaacccatttccagtcctttccattcaagtcataattccggatttggtccattttgatctcgggccgcagttgcgcgacgtagatgcccacacagatcaaccaccattggcgaagaagagagatttgaaactggggaggaattaaaggcaacatgacacggaccgcgtggctggttgcgaggttcatagcgaagaaccaatcgtaattcccggccgaatctgctgtcccaactagcaatgcagctgcaagctcttggctctcgcggaactgttcaattggattgtcgatcttccatgctttccagtgcttgagaagcacggcgttgtggctgacaaaaagggtattgaggttgtcgtcgccgggagtggaaaagaggccatctaagtccttatctttccggaccatgtcaaatatttcaaagagtgactttgattcatattgtacctcatttttcgagagtttagggtcctccagggacttgtatatgtcgttgtgacaggttgctgcaaggccgagtgcctccattgcaacttcacgactgtccatttcaaaggcgtatgcaagatgaatcaatggcaatccaactagacagatgttagagcgtgatccccccggaaagctgaaaacatacgagaagccattatagaatcaaacatgggctctttgccagtatacaagtattcggccacaacttccttccagtcatagctgcggtgaacgacttcatcttcaaaaaaatccacaaaggctcgatcaaatctggttggcgttagtgaggggtcccaagttggaaaggcccagacaagcccagcaacccaccctcgccgtcccaaatgacctcgccaatcaagggtagtaatttctgccggtgaatccttccatttgactagaccagacacttcatgctcgtataggcagcctaaagtatcggcatctgcgccttgcagaaaggaggagctcaagagctgcaagcaggtcaatttcatggactaacgagtaatccatacataggaagctaatgttactaatgtaattcaaatgactcacatgtgttaactgattagggaagttccgacggtcgaagagcgagttctcgacatggttcaattttagtaggtgcttgaatgcccgagctgccttgtcttcagctgtctcggtttcatggacgtggacagggggcagatcgatcgcctgagttggcgtggacgagaacaggccaagcgaaggcagtgatggccaccgaacagtaaacattttgctgattagtgaagctatgtgtaggcgtttggatgggattgttgggaaagcgtcacgtgaagcagaacgtcgtatgacgtaggaaatttaggttatcaatctggtgacttctggtcacatgacctggtgaatcggacgacttccagctactcaccttgcttcagatatacaaaagcattttttgatgaatcagacgattgggtaaatcgatgctttcggtatattccagaaaattgtattattttacgacatattactatttctagatgggaaagagtgcctggattgagggatattccatatgaaaattcatgattttgcgccataatttacattgcatgcatatcctgaccgtctgaaccttacgccttatgatgttcaaccattggaatcggctgctccggctgagcagcaacctctccttggaagacttccatttcaagacggggaccgacgaaattcttgcgtccatctaccatccactgaatgaaagagataataaagacaataccaaatgccgcaacacaataatctgtcacatcgaattagctttatgtttttgcatcaaaaaaagagagtcaactcactcatgttgctaccagtggcaggcagctcaggggggaagaggaagaggatagtagtcagaagaatgtacgccagcgagatctgaggttttgagttagtaataatttcagtgaaccgcagggaaaggtatcatacgatgttgatggtccagccaacaatttctggcaggacgaatgagcgctccggtagcatttttcttcctcggcagcagttcactgcaattggcattccatatgaaaggccgagcaacaccactgacgctgagacaatagcattgaaagcacttggagatgttagcaatatccagggtggagtgttatgcatatgcttacctggatgagcccaagaagatacaaccgaatatgaccacgagagccagattgagatataatgagttcaatgggacgtttagtttggggtgaacacgagagaagaagggagacgcagggagaccgccatcactataactatatcagtataatgaccaaatttgaaagatgaacaataacgtaccgcgcgaaggcgtagaccatacgactgctagtagtcataatagcgattgcagcgaataaagcgcagactagggggaagctagaaaggtgtcagtacaaggaagagacaggagagcagtgacacctacatcaagagacagatagcgcctgcgttgctcgaagtggcattcttcaagattgcaagcagcggggttgcagcagaatcaataacttcgttgatatcgccagccacaaagagcagcacaataaggaagatggctccagtaacggtaccgatcacgacacaagcaatcatgatcttgggcccctcaaccgagggattggggatttctgtaatccattagcctcagatccatatccaagtgtaaactcctggaagttaccttcaatcatgtgggcgacaccgtcaaagccggtaacaccaagaccaccttgcagaagctatgaatatgttagagatgctcatgaactttcgcacgaacgacataccccaagcaaccacgcaattccatcaggccctataacagtcagtttgagagcatagttagataatgatcggtaagacttacagcctgtttcgttgatgaagtcggtgaagacaaatctgttcattgtcagtgatttagttctaggattgtcgagcagacaagacgtactctccggaattatagttaggcgaggcacatgaaagtacagtaatgcaaatgatggcaaatcctgacaaagaccagatgactgtgggaattagtaagaagtctccgacagctcggtatagggtatctcacaagctgccttggtgacatagggcataatgttgttcataaaggcattgacgaggaaggcaacgatattgtagccgatgtagattaggaattggtgccagcgctgggggttatagctctggatatggaagttagtcaaagatatcaacgttatagctcagaataacctaccgggttcatgagagagatcacacccagaataagctgactgcccaaaagaccagcagttgcgaccagcgcaacccagccagagcagttgatccagccagtgatccaggagagaattggcatccattttttccacgaagtcacagcgacccagtgatattggcctccggcagtggggtatgcagaaagaaactcggctagggaagtggccatgcacaaattacagattccggctgtaataagacctattgagactcgtgtcagctctggattgagaatcgacagagagccaggcggatacgtaccccagacaatactagtgcttcctcccgagggtaaactgagagacaaacttgccgataaagcagtccatgactgtcaaatgtcaattgttgattctcatggaacttggtttccgggcgcgtcacgtacatttagaatggcaaaagcaaggcccagcattgaacttcaaaacgaacagacattagcacaatcaggaattcatgttcacttgcagcacgtacatcagcgagtaatttcgcttcagctccgacttatggcccagctgggccagctgagcctcgtcgctattgtattcttctttgtccatatcgagtgctgtgtatcacaagcaacaagtgatggaaagaagaggacaggtaaggaggaacaagggtattattaaaccagtcccagattgcatgacctgacaacggaatttcgaatatcaaattctccaatcttgccgttctgcgctaccgttggctccccgcgggggaatacagcgagtacggagaagtgttaggtaacggatttggggttatagaacattagccagggcggcgataaccggccgtgcctgtgactggctgggcggaccgagatcggcaacttcggccagtcagagctgtgaagtcaattagctaccaaggcttttggtcaatcgcggaccgatgatccatggcttgcggcggcagccccagtgcttatgccacgatcggcgtgtcattggtcaattgccgaccccacatttattgactagcgggaagaagtctaactcggggaaatggataactgcgaaaggacatatctgatatgcaggatacatgaagatagattgttctcgaagatccggtccaacactctcgacttttactgtttctagaggcttttacggcttttgccccctgtttcagtgaaccggatcgagacgttgaggttgagctatgtggagcggtgggccgtaaaccttccaaggttatctctcgagacaaatactcctatgtaaagatatctcttgtcttcactgagtggactcctttcaccatgtggcatgctttcttatccgatcgtccatcaggacgtacccgcagaggcgaagtgtgggccgttgaccttgatcttattccaatgtgctccgagcgtatcatccagaaagaagataattatgagaatcgaaggattcatttacataaaacgaagaagagcaaatttactaactagttaactagaatttgtattgatttgtcacttccattatcccgagaatgtaccgggtacaaagtagtacgtgcattgttcaatcccaaaccacgtcttgacatcatccatggaaatccaatcctcagaatttccaacctctcattgttcaaatgacaaatcatggctggtctcaacaaacatggccaggcaaacaacccaggacccccttgacccagtgttcctccaactcccctgtccgttacagccaacagtctcaaagttaatgaggcctctctggcatcagttcttgcattcagggggatagagccacctgtggctacatattctgaccctcagcatgcagcaggaaccaacccccaatgcactcggttcgaacatgctcaaccatctcggccatggtccgcacatgaaaggcgcgacggaagatctcgaaagatcgctcatacttgtcgagagcaggatcaagttgcatcatctccatgtgggtgttggaaatggtctccatttgggggtgcgtgagcatggcagtgcaaccacggcacgcgtaaagaattttgcgcgtattgtttcggttgacgacaggcacccggcaggaaacttcatggtggaaagcatgcaggttgcaatttcccaacgagatgaggaaacgcatcttgacagcgttaggggtatccagggaaacagcgcgataaatatcatgctggttcacgaccgtgaattcgtcatcggaaccatcttcgtcgtattcgttggcttcgtcgtcgtcagaaccgaacaggccctccgcagcacgcttgatggccttgcgggagccatggatttccagggctctggtcagcgccaccttgacaggaataacccaggcaccaagatcacccaaatccatgtcatcctcatccttgcccaggcgcggcaggaacacggtttcgggaccaatcagatcgggcaggtcaaggccaaagatcattgctgcgcgctccaaggggaggcaccagtatgcatggttgttgtgcacgcatgggtggcagatacgctccatggtaggaaggtagagctggacagtcgagttgccacacatgacgcacttctcacggataattgcctctttcaggtcgtgaatgctccagatcttaaggctctggatgttcatgagaatcttcggcaggccgggggcccactgccgcaggagggaaaccgcgcttttctgcacatagtgattggcgatgcggttgacgtatgacaggctgatagcactaggcaggtcgagtttgttgatgatcatgtctacgacttcgttcgggagacgactgatcattcccaggtccgcagtagcggtccccttgggtttgatggccactggaacaggccggacctcgacatcaacgatgccagtttccaggctgcgggggctgtttccaaggattgatagcaccttggcagcctcctggtaggtggcaaaatcctttccccaggccaattgctccggttccagcgtgatggtttgcattgtagcgaaccgcgcgtgcaaatcacaaggagggcaatttgttggggaaaacgcgttgcgcgttaacggataaaagaactttatcagtgttatgtcagtggctgatgtgatgaacaaacactgtaggtatgataaacgcgaacctgatgaaaacaacaaccaacgcgcgggttgagaaggatggagtgggaagggagatgtgaagaggaaagggaaaagtaacaacaagaaggcacaagaagaaagagacacaaccccccagtttatggactgaagggaatgggaaagtacgggaactgcctggcgtaacaaacacaataccagtacctagggcactttacgatgtttgttcacatactctatttctcagttaaagctttcagtaagcttgtgctcgtagaaggcctccagcttgaccttccatacatgcactctcatctacttgaggatataaaagtgagtctactaggaagatcagtccaaataagtctaacgtcactaccaaagacaaagttacaactgactagtgcttcaatacttccggagaacaaaaggttatcctgtttcattcattgatgtctggtaggaaacttcactacatcataatagaggaaatgtctggcctgccagtccaccggggatatcaccagagctgacagctggtgggctgggatagagagtagtccatgaatgcatctatcaaagagatatcctagatctagtgtaatctacatagctaatatggttcaaaatgtctcagttctgatacctcttcgtcattagaatcaatgcaagtcgtaggacgtcacataacagtccaagtctaatgcattgatgcactaaataacattggtgaaagtagtgaatcatactatctagaaataaggtacatatattaaattctaaccatgtaataccttgagatacccatggtactgttagtaggcgcgcgggtaatgctagcttaatatcaacgggtaaccttaatttgatatccggcccaccaggaacacgcggtgtcacagggaacaacctaccaacttgaaatactatactcacaaagataacattgtgatagaaacctagggatgttgtaatggcagagaaaataattaaaatgtacagatgaacataggtatatcaaatcaggatagtaaatacaaaggccatcggccagctggcacgttaaaatatacaaacagtgccgggctttctattcaacctcctccatagggtttttcaagtgatcagtccgaacgacgtaatcatcctcgtcttcatcatctcgggcattggcaccatctgccatatcctcatcgtcaccatcaacagatccatcggattccgcaccagtgcgggactttccctttttgctaacgctctttcctttgcctttgctgctggttgttgactggccgctgccacggcggacaaggtttcctggccatttattcaggccttttatacgaccgtggatgctcccggtggtgctactggcaccatttgtggcaggctcttctggagtggctgagccgccttggtggaatgcctccattgcctctgcgattgtctgtggtgcggtatgtgcggagtcttgctttgacttgtctactgcttcgaaggtttgacggatgcgctcaaagtgttcgagttccttggcactgcgaggagttagtatcatggtatgtcatgaaaaagagacaagagaggaaagagggtgagtgatggacacatacctgacacttggcacgagctctccttgagcagaaaggaagtcctcctcggttaccgtcacattcacatcctcctttgtggcgaggtggtcaaagaaccaagcggtgctgacgggaccacctggcagagtcttaatcttctcgtcaaccgcagtggcctttcgagtgatggctttcagcatggcatccgagcagagtgcatacagatcagcaccggtataagttagaggaagctgttccgcaacgcggtcaagcgagacatcggggctgagggcgaactttcgcgtcaaggcctcgaggatagtcgcttgcttcctatgtgtatctgacacacccaggtagagcatcttgtcgaagcgaccagggcggagaagtgcagtgtcaagtagatcgggacgattagtcgcaccgatgacaaaaactccaccgctattctcctcgccgccgttcattccatccagctctgcgagcagctgactaacaatacggtccataacaccaccactgtctccctggttaccacgcttgggcgcaacagaatccagttcatcaaagaacacaacgcagggtcgagcatcccgagcgcgctggaatacccggcgcacgtttgcttcggattcaccgatgtacatgttgagcagttcggggcccttgacggagaagaagttgagagagaactcggtggcaatggccttggcaagcagggtcttgccggtgccgggcgggccatagaacaagataccactgcgcttcttcatgcccttggcgaagagttcgggccgttcaagtggcaactgaatggtctcgaccaaggcatccttaacattagtcaatccaccaacatcatcccagccaacatttggaatcttaggtgcaccgatcgaatcggcaaagttcttccgcgcagcttctacagcagcgtcaaagtctgccttgttgacacctcgtgcaccgtcgcctcctgccagcaggatgtctctaacaaagacgtccgagccggaaagctttttgctagcctcggccagactttcgaggcgagctgttctcgccccggcagctcgttccaccacatcaaccagatctcctgcgacaagagctgcggtcttcagagcaatgctgcccagttccacgtccgcagacagtctgatactgcgatctgcgacggcatttcgtaaaatgccttcacgctctttctcctccggtgcacccatctcgaactcatgggtgatgaggctgcggataccttcggggatagtttcaacatcggtggtggtggcaataacaactctcgcatcattcaagatatcgctcattgccgtgacgatacgatcagcagttagaacctcgatatgtctgatcagcagtgcggtgcagtttgctccgcagtggaaagcccgttctgctcgggctttgagatatgcctcggtcttgacatcgccaccattcgcaccaccttctgtcaagatgtcgtacgcatcaatggggaatgtgtggaggccgatatccgagcacgctcgagtggcgacggttgccttgccgatgtgcctttgctgggatctgaggagaatgaagacgggcttcattcctagctgaatagcccgcgggcttgtggcagcagatatcagatcacggattcgctgctgcaatacagggataaaggactggggtggttcggcaacaatgccatgaggcgttgggacatcatggacgttctttgggattgtcttcacgcccagccaatactcccatccgttgtccagcactccgggaactcggctcacgtcactcccagcctgtaccatgcgcgtagtcgctggatcaagtacagcgactccaccccactgatcttcgcctgtctcctccagctcctctacaacagttggggctacatgcccgacacggaaccaagcgacgccaattttgcgggttccggcattatttgcattggcaccttggcctagccggatggtaatatcctcctcctgactggcactgtcaccgccagcggtgccagagaacaccgctctgccgagtccttcgtccacgctaattccgaccaaatcaccacttttaaggatacgccggcgtgactcaaagtactgtttcaaccccgcaaatagtgctggctgaaggacccgatccattgagagaggagtggaaaccttgagcaacgtgacctctttcgccaaaggcgggtttttagcagcagtgttcttcatgtgatgcaaaagaccgggtttggaggagctattaggggtaacgaaggtcatgggggaaatccgcaggtactttggattttcaatgttaccaagaagcaacgggggaacgaaaactgaaggggttaagcgggtgggtgcacgttgtgagatactggaccggcgttcacctgagtgattaatagcataccgcggcttggaggacggaagacccgaaagaccaaagatcttaactgggcgccaatcgcctgagtcttcaggggagtcgttgaaacttccaaatttgagcgaggcgaacatgttcagctgcggctcctcggcggcttcgattctgacccaatcgccagagaagcatccaatcttggcaagggtgctgatatctacaaagacaaaggagtcgacgtcttcatcgtcgcgaggccgagggtgcaacacctcatttgggactttctgcaagagtccctccaccttgaaagtcttgcctccaccacggccagggcgcagggtggccgatgtgaaattcgacgccacagacccgggggtatggattccatctaatcgtcgaccgccggctctaggagtcgccgaagtcaaggaagacatcacccccgatgatggctgtgggagttcaggtgcactaagagaaatcatgtcgtctagagaatcatccgaggagtcactcatagatcctgctgacccctccgtatctgactcctcagcagctgatgttacctccatttctgtcccactttcaccaggtttatcctcggctgcagagtagaattgttcatttgaagtgtcgtcagcttcgtcctcggccacttgcttcagaagcgcagacctggaaggcacagtttgtggagcgcggagtccttgagggcgagcctggacaagcacaatctttgtggtcggcatcaacaaaccttgcgaaacgggctcgcagaatgagatccgcgcaggcggtggtggcgcataagttatgggatgagaagggagtggcaggggtagcacgtctccgatatgtacaatgcgctgagcccccaatgcttcacggactgcagcagtgagacgctgttcggcatcccttttcgaatacttcttggcttctaccgacctccccgttttcccccaaagtccattcggccccgcattcgtaaatccaccaccaaatttactctgaacatcatcgtgattgcgcagaagatgtcgctcaacagttacaaagattgtatcgaggtgaatcggggcgacatccagaatccgaatctctacggaacgttgtgcctgcagggagttgcgtgacgagtcaactttccccagagcttggaggaaaggctggagtgaatctgctgattcaggaaacagaactgtcgattgtgacattggaactggcgctctctctgtgggctgaatgcgcacagggagtatcgtccaggtctgatcttccacggaggtataagtcggcgtatgtggggcaattgcaacataaagcactccatcgtcggaagtcgtgacatctgatcagagcaagacgagccggttaatactattatcgagaacagtgaacagggcttcacactcaccttggagggcctgctgctggaaaaggtcattcgcaagctcctcggacaatatgccgaccttcccgcgcagctggggatctagcgctaaacgtgctgcgatgggtgccttgttgttcaatcgccgctttccggctcttcttctccgttgtcgaggccgctgggagctctgtccatactgttcgaagtccatgggtgcggtgtcttgtccggttgccgtcggtaaaatgaagcggggagataggagatgtggacggaaggcaatcaccaattcagctgtttaatacgcgcatatgagacgattccctacagaaccccgcgccagatttagcgaattactggggaagaagacgaggttcgccggattcagaatccgggggaaatcaacacgcgggcatctcggtaccgcccgcaattctgccatatcccgaagccgaggtccaatcggtcaagtatatgtatgtgtaggacatatatgcatgaatagaaaggatatatgtattactgttctgctacacttccattcaatcagcaatatggtcccaatggtattcgagagtgtatggcattcagtctaaccccagtcgcaagcgtgccctaacaccattggcttttatctgcttgtgatagttccccagctctggagctccaaatggctgacatcattcgggctaggatcaaattgactcccgaggtctttatcctctgaacgaagagatgagtttagaattgaggccttgtccctttttcttggcaaaatttcgtccctcggaagtacgtcaactctcgccattgccaaggcagactcattcgtagaggttttctagcaggtattggtcatgactagttatttaactaatcgttaggcagttgcatatcgagttcataatttcgcagcctggaatatttaggacggaagtcaggccggtgacgggcgaccacgccaaaggtgatgtggtgatgtaggcgagatacaattccggggggaaaatgcggttgactgattgtttccccgggcggcttgggtagactttcataccaattccatggcctagtgccattgcaaagtgaggtcagttacaacgtaagatagccatataccatgaatgcactccgtactccgtagttggcatatcaatgaactatactacaagggtggcgttgtcggtccttttagagatgccaactgtaccgttgatttcaggtgtagtagcttataaagtaaataagacgctacaaagtggctcaagaatacatcgtctctttggaaagctggtcctttttgataaactgacaggtaggctgtgcatgggcaaaaaggagtcagaaaagggcgaagttgaggggtcgatacgagcaaagagtctatttcgtccgatcagcatagcatcacaggtagagagccgtattcgtttcaatcgggcgagttttcgtccgacaaacgcaggctgagcagaccaacattggaatattattgggttactcaagacgggtacaacaagcggtgataagaggctcaagagtgcgtatgcagctcgtatttggcaagcatgactggaccagaatgagtctttggatgagctggcatatcggcctaaaagttagtcgacggtgttccctttttgttggctgtgtgacgaccctcttgattaccaattgggggccaagaccctgagcgtcatgtgccccatgccaataagcatggccatggtaattttcccagcccagactttttatggcctgatcccagtaataggtgacgtagacatggaagaaaataaaggtgctgactccaccggctttcactgtactttggatgaggacgcgtaggaagaaataaaaatgctgcctggggaggtgaggctcttttggaacggaattgtggtctttccggctgccgagtttccattttaagacagtggaaccggtggagaaacggtaccgtacccgccgggggccacgcgggagccacctcaaatggctggcctgtttaattacggttattggtttaccatacaaactttttccacggccaatcaccggccgtagaatgtgctcagccttcgcattctataccaattcggtcttagcgccttcgtctatcaggcagacatccaacacgcaatgagcctccggtcccttctcttccttgatccgcttgttccccccgtcgtctgttgttcgtgttattcttcatttcaaatcctatttggctattcatcgctgccttcagtctaaggatcctaaagatttcatatttagtggggctgaccgcttggaacccatcttggacgttatatctcaggaacattggaatcccatcagtacttcgaattcggcgaattcatttcaccctaggatatcgcaatccttgattaaaatccttttgagctggtgttcttgatacgctctgtctcaaaccccgctttgaagttttccgaccccgcgacacgttggattggagtgcatgttcttccagaggctctcatacgatcgctatcgtgatagatcttcagggccctcataccggctcaaccattcggctttaatcaaccctggttgggatccaagagaggtggtgctgttatataccaaagaacgaagatcatccgcatcaaatcgaggcttgcatctctgactcgaccgtacgtcacttcgctaatcatttggtcaactctccggtgagtcatgcgatgcgccaatcagccgcaatccactgttcctttcctgaccgagaatgtatactaaattctggccgacatagtactacgcccaataatgtcttctattcagactgagccgacgcgggtgcacccnnnnnnnnnnnnnnnnnnnnnnnnnnnnnnnnnnnnnnnnnnnnnnnnnnnnnnnnnnnnnnnnnnnnnnnnnnnnnnnnnnnnnnnnnnnnnnnnnnnnnnnnnnnnnnnnnnnnnnnnnnnnnnnnnnnnnnnnnnnnnnnnnnnnnnnnnnnnnnnnnnnnnnnnnnnnnnnnnnnnnnnnnnnnnnnnnnnnnnnntgcacccgcgtcgtcggccggtcttaaacagcgctcttcccagcgactcgcccagctctaaaatgcccctgaagaaaggagagactttccattcccctacttctcctccatccagcgatcgcgaccctgtcttgaacttccgctccctacctcatcgctcggccacctcgttagaatctatcgctgttgccgaagagcgcatgacttccatcctaggccggctgactctggaacccaccgaagaccagagctcggacgctggtgaaagtacgatagagagtgggttagtgcgcagtaactccgagtctatgtctggctccccgcgctccttaaaagaagagggccgcagcattcccatcccactagacgagaaaaagtcccgtcaacagcatagccacgagtccgacagtggactaggaacttctgtcagtagcgaagaggggctcgctgattctgaaaataaaggtgggtgtcacatgccccgggaattcattgtttccctttgttccctattgtttcctatttgagtactaacaatgaatagtgaatgatggtattcatgacaatcaatctgccatcacaagctctatttcggctttcgatgttggttcatcgccaaaacgtcaattaggacccgccgcctgcaaacagattgaacgttttgtgcttgtccctattctgaaagagccccgcttgaaaccattccacgcattggcccgaagtgtcccccagcgcattatcaataaacagattgtttgcttgcgcgacctcgagaaaaccctattgtggttggcgccggtaagtcaatacattgttctcttcaatgggtttatggagttctagttatgcttattttttttcttatacttcaaagaactccgccacttctcggaattcttacctcaacttctgcgaatttacaatccaatgcttacatacttcggcgtcgcacctcaacgatcgtgatcaacgactaccagccgatcgaccttatactaacggatacttccttgaccttgtttcgcaggtccgacgatacgcagcaatgattcgcgctgaacgcgagcgagtccaggcgactcaggactccgagactaacaaggagtccaccccttctatgtatgtgatattccattcgatttggacagcagagcctagctaattcaaaatagcatcccgaaggctactctggcaggcggtctatcccagaatgggaagtctgccgaacttgtaattacgcaagacggaaagcaaatctctctggccactggaaagccctacgaggcggatgtttctagtactaccaagcgtactatcaccctcgatgatgcaatcgatgagggcgttgagcgctctatggcgcgccgcaagaaggatgcccctcccatgaacatcaatcaaaaatgctccgactgcgacaaggtctttaagcgtccctgcgacttgacgtaagttgtcctgttgaatcgaagtgtcggaattcaattgctaacccattcataggaaacacgagaagacacacactcgcccttggaagtgcgagcactctgactgcaactaccacactaaaggttggcccaccgagaaagaacgtgatcgtcacatgaacgataggcattcggaaaagcccactctctacaagtgtcaattccacaagtgcccctatgcttccaaacgtgccagcaactgcaagcagcacatggaaaaatctcatggttgggtttacgttcgctccaagaacaacggacgcaatggcagcaagcgaggctcttctgtccaggccacacctcagactcccagtgtgtctactcctgcttcgaaggcaaccgacttcgcatcgccaatccctggtcccagtccttcacctagcgaccaggcctacaactggcctgagaatccccagttcaacttcgctgaccctcctgcgcttgcccatggggaggatttccctctattcggagaagcatcaccctatttgatgaccgacgttaactcgttcccaacatcggtgaatctgagcggcttccagagtcaattcgaagcgggtgacccgaacggcttgattccagccctggagatgcaccgccagtccatgaactccatgtctattccatctgccgaatcggttcccgacttgatgggacctgtgtcctttgacggatccccgctcaccggcacggacagcatcaacttcgacctggattggagcaatctggactatccaaccaacgaggactacactgcgatggctgcacagcttcctcaggctcatgccctcgaggccatgaagggttattcgaatgactacgaaccaatgaacctcagtcactgttcctacgatgcctctgggaagcccaccggcctctcccccggtgcgcagggcaacgccatgttatattcaccggattcttgtaacgtcggcgacactctttctgagcgctacgaatatggactccaagcccaggccggtaacgactttaccctttataacagcgctcagatggctcgcggcgctccacccatgatgcaaactcctcctagcgaccactcgcctcaataccagcaccctcaacagatgttcccctcactcgagcatgagcgcgctctgcagaacatgcagacctggaatggccagcagccccagggacactacctgcctcgggacatggagctggaatttatgaagtaaaaaggcgggattttggggtgtctttgcaaattttgttttctggagcgcatttaatgttgtcagcgatggaatgcgggttttccttattttttcatatttgattgagcttaatctttccactctaaataacatggctgaagtcctgattttttactttcatattgatggggtgtcatttacttttacgctttgaaataaatagatgaaatgaatttttctatccaactgaaagagatacatatcgtagttcctttgcctcgtgaatacttgattcatttcaatcatggccaggctgtgtagcaatatatgttcctaaacatcacgccagtacacgtagagattaggtagttaattgaatattgactcatcccaatcaaacgccctcaaaccatttatgctccaacgcctgacgcgccgtgatcctttcccccggatcaaaacgagccatggcacatacaagacttttgaagtcatcatcaacaccattccagagtacgaacggctgacgaggggtcttctggttcaatccatcccaagtgacttcgaaaacgcgaacccatggattatcaccaagatgcttcaagaatccattgagcccgtcttcatcagcgaagtaagagatctggcgctcgattacgacagcgatgggatcaacgccctcctctaactcatcttcccgaactgcaaaaatgatgcgcttatgaacggcacagatgcacttgatgaccagttaccagctgcgcttaggaaattccgaatgtgggacttacaacaagagcaaatgagaacacatctgaaggtttgttgacaggtcctcttgcgtgggcttcgggactcctccacatccagttgccggcttgtttcccaaccatatcgcatcctggggggatatgagctgcatcttccagatttccgagttgaactttgtcgacgattatcttgccattgcgatcctgccaattgatgaagacgttgtcttgttttatatctacaagaataagttgtaatccagtattccagggaaatagcagtggaaatacctgtgtgaacgatatcctgatcgtgaagctgagcaagcccggtaagggcatccttaaggattttcttcgttactggcaggggcaagcccttctgagcaagagttaagaggtgacctgtgaaggtttcgaaaacaaacatagacttgttggggatagtgtctacagtaaggcggacatggcttgcattgccacgtaggcgattattgacttcttggagatcttcgaagtcgatgggatgtatgtactttaatatgaaattttgaccatccgctctaaatgtataagcatgtatgtaaatatagggaagggttggtgtctactaacgaggcacgatacacttgacgcggtggagaaacttcctcctgcaaaacatgctcgatagtgtaagtgcgaccggataggcccgtatactgtgtagaaagcagagggttgcttgggattgtgctaattgtgcgatagaaaagacgatttggtactggggacgatgtgcgctggagagggcttaggtacgttgagcttttgtaaagacgactcgctagaagagcggccttcgtgccaacattggaggtagaatacgtgaggatatagtttaataagtgctttggataggcgatgtctcttttcacatattgtaggaaactggccgtggttgacgaatcaggggaaaagcccccttacctgtggttgaaggcaagaagccgagcttacaatccctgttgattggtggttaacgcgtcgacgcggataacatccttggtcgcatgctatttccgtattttcgccaatgatgacatttattattgctccgctccacaataacaaatagccgcaagggcctaaaagaagcctaacggaatccatgtaagcgccagtctcaacctggtaatgcccgtgtacgtggttttgaagccggtgaatcatttcttcgctcaggtaagggaggggactcttgaagtaagaggccttccttagggatcgaccacatacgacgcttttactttgacgtggaggaagccaaggcgcggcgtggtgggcctgcgaatatttacacgtgacgtcaaggccggcgtcaggtgcagccatttttggccgctggctgactatttcatcattgtatggaggatagcaggatgacatatagaatcttacaatatatagcctttcatagccttgtatagccccaatatttgaggtgtcagctaaatattaaaataaattggggtgacgacatcctgtctttcccgacacctgctccgctccccctccacattgtctttcccacatctttcccagtacaaacatcgcgggacaaagcattccattccctggcattccccgctcttcagccctgtcgacggagtagctccgcattacagccccggcctctttaggcagacacattctgtgcttcaatttgcatcacgtgaatcctgggcgtgcaatttagtctcttagggactcagcttccctctcaagtgagcaggagcattaccgctcaacatgccagacacacaatcgcctgattccgctctacctagcggcaacggagatgccggtgcaaccccgccaacagaccaggtcttgaccggcaagcaagaacactgtaagttagagcatatgatgatgatattccgatttcacggtggctgacaggtagataactggcatagacctcaagcgcgagctcatcgcccgcgaagttcgtgctgaaatcttcgaactaaattctcctaccgcactccagcgattcggcgccccattcaaatcggaattcggtgaggtcgccccggtcgactcggaactgcctattcttcggtatattttcgttcaccacgtccggaacttcccgtttctggatcaagcgcgcgagaaggagttttggcaggataagctacaagttgtgggtgctacgcttccctgaatggaaaacggactaacagttgggaatatagttcttggaatcctttgccaataaacatgtctcgtcttcggaggatcgactggaggagacgaagcgccggaagttggcccgcaaatgcgagaagctcgtggagctgatgatggtttccggtgtgccgaccgcgtcgggatatgaggagcgcattcagttctcggagatggaaatcgtcgagcgtggtgctcaggattcgggtctgctggctaacatgcccgagggtaattcaattaatggttgggatgtgaacgtggccgccgttcggacaacctctgtcaagcggacaatgcgataccatcaacatgcagtaagtttgattctgaaaaatggccttttgggagcgggatgttttgctgacaattaatgttgaaggaatttattattcgagttcggcaccacgacaaaccggagattcatattgggaggagatatggagagtttgtcaagctccacaagagattgaggaccgagctgccaggaaaacaactccctcctcttcctcgtaagaacaagtcttcttccacctcgagctggtggggctctagtgcagatgatgatgcttcgtccctttcatctttctctactcaggacacgagtgcccccgaggatcggctctcggcaccaacgctttccacagggagcgtccggcgatcgctgtcccgaggatcaaggcgatcaaccaagtcaccgcgcacgtcaacgagcgacgtgtcgagggcgactgtgctgtaccgagaggagcagcgtgtgtcgctgcgcgcgttccttcgcactgcattgcagaatagtcgcattgcagaatccaaggtcatggaagaattcttgactgcgcgccccgtcgagttgaacgaggaagagttgattgatgtagagaaacggaaaagcatggatgctgtgaggatcgaggaacagaagagattctatgagattgctaggcaacgagcggcggagctggacgtgtacatggagcagttccgccgggatattgtggagagcagtaagtcgccagcttcttccggcgtaacatggtttgctgaccacaatttcagatggattaacaaggctgttcgccgagatccgggaaaagccttcaattgcagagctcagcccgcaatatcagaaattcgccgagtggctccgcattgagtaagttatctgatttcctggtgtttcgccgtcctaacattcaatagggttgctgcaacaatataccatctgttccttgccgaggataactcccctgaactgttttcacaggcgaagagaatccacggcctggttccctacacgctcatgaagaatgtgattcgcatcgccaaccctgctgcagtcatgtctggtgttctagaccttttcatggcccagcccttcggctcgcggtcacttttgcaacgcatcttttcattaaccctaaacgaaagcatcaaagatttccaaaaatcaatttcttctctggcttcgaaggttgaagatcctattcttactcagaagctcaagagcttcgcggatgccgaggaagacatcaagaatgagatccgagcagaggctgctaccgacgatgtcgacatcattgtcgctatccttcgctctgaactactgtcgcccgaactcaccccggaacagattggcaaggtgttcaacggctacgtggcttggaactacgccgtggagaacgtagacctggaaatgcaacagggcgcccaatggttcgctcatatgaagcagcttctgaagctctacacccgccagcgcgacaaggcgatgatgctaagcattgttgaggaaccagtcaccctgcagctcttccgcgatctgttcactatcttttacgagccgctcgtccgggtttacaaatctgccaacgtatacaacagcattacggactttgctctatttgccgacgatgctatcagtgtgattgaaagtgcccagcgccaggatgcctctgccgatccgaaccaaacagtgcaggcgttcatcgacctgtgtgctcgccacgaggccaacttttacaagttcatccacgaagtgcaccagcatgataacggtctcttccagtctctcatggcttggattgaggagatcctcgatttcctgcgcaatggccccgccggaggtaaaatggacatcaatgctttgttccaaggagctgtcggagttggccagatcgacaaagaccttgctctcacggaaatcaatcagcttatcaagtggcaagaggaccggaaacgctggcatctgaacaagactcgccagaagatggctgctgaaggtatatctggggaggctatcccaggagctgcagccttcaggggcagtgatttcggtcttgatgaggtgtgtttttctttgacttcaatatggatttggatttcaggctaaccagtttacaggctgatctagaggacctcactatctcggatgaagcatctgaagcctctgatgaagactctggagatgaggacatggacgatcccattgccgtagagcgccgccgccggtcaaagaaacaggatcagcttcgtcgtaccgcgggtgaacctgtcaagcccgaggtcacggagattctcaagcttgctgatccgttcggtgccatgttgcgacatgtacttgctgattagacgtcgatgttagaattattttgctacattcgtgataccgccatagatatggcttctcccgtttgattcccactatttgattttgttttcatacaccgattcattgcttgcttctatttcttggttgtgctgagggtggaaggactagatagatacagcatatgatcgggccgcacaccagatgcgttatgataattgagaccataatattcacggttcgctgtcaatgtatctctgtagcacctccgcaacctggcgattgccatattccaaggccacggccaccggcgtcttcccctctgcatcactcaactgcaaatcaattccatccgcctcaaggagtattatcacaacacccaggcgaccgctcaatgcagcatggaacagcggtgtccgacccttcttgtcgcgagcattaggattagcccgtcgaggcccagccaacaaccgccgcacgatgtcctcgtggtttctttcggccgcgattcccaacggcgtagtcccatgcttgtcagcaatctccaggtcaaccctgccagaatcaagcaacagcgccacgatctcgtcgtgtccatgctgcgcagcaacaaacaagggcgtctgcttcgtccaatccgtctgcacgttagggttcgtagccttccactccagcaaaaactgcacaacctccaaccgctccgccgaggccgcaatcgcgaacgctccccggccatactgtcgttcctcggcgttagggtcgaccttctctccatagcatttcaccatgtaatgcacgatgtcaacatagcccatgacagccgcatagaaaaacacatgctgacactcctcttcgccatcgtccccctggataatcaggcgcaggtggtcggcaagcaacatgcccacgtctccatcaatctcctgcgcggcacgactgagaggcgtccatccctgcagatttcccacgcgcggatcagcccgtccgctacagagaagcagggggaccatcgcgggctggtagttgacggcaatcatgagtgcggtatcgccaatcttgtcttgctggttgacgtctgtacggctgtcgctgagcagggtctgaacaatggctatgcagcactctttgacggcccaggacagtggcgagcaaagccatttgtcatcgggggtgttcgggtttgctttgtcgtttagcaagagcagtttgagtactgcggggctgttgtaataagcggctagcaggattggggtgcagcccttgagttgctggcctgtatttatctctgtcttggattcgatgtcgaagcctgcggaaagagctttgagggctgttgaggtgttgtcggttgttgcggcccagaagagggatttggggttgggagactttgcatcgcgcttgtacaggtctgtgttgaggagactgtaggttgctgtggtggtgcgcgcgaacgcatttaggtctgatagtgatggaaggaactcagatatcgcgaggtatagttctttggggatggttgagaagggtccctctttggttgtgcgtggtgcactcattttcgcgtttagaggggtatgcaagaaggaggatttgattgtgggagtagtaaacgcgtgagtactttaagaagcgacagcacgtgctgtcaaacttcagatgatttctttatacatactaggcaagcggcgttgaatgggttgagatcaaaccacagcctcaacaatgcatgtcaaacagtctcttctattcaacctgattatagattaccatattatcccctatatctatgttctattcatagtacatcttctattcatgcactgttaacccacctaaaggattttatagatcttctgataatgccaagacctggagtctcgataagagataagccagtttccatggcgacagcgtcatcttccctcttcaacatttgggaaaccactgtcgcaaatgtcgtaccctcagatataccaaggttctccaagaactacttcacgccagaaccgtggcctcttcagagatggcctttggtgctgtaactgcgcggatcggccagtcgctgtccgtcgtgaaactaagaggcatgggccaaacttagggaaatggtgtatgtagaatcttccgaggttctcaatgctcggaaagatatccccatgctcgataaaagtcagcgactgacatacaaaacagtttggacttgcgcacagtcgcgatgcagcttcttcctgtgggcagctgacgctgtaatccgcgaacaagcagtcgttcttgccaactctcgatccgaaaccgactctttctcgatcactccatcaaagcgcacaccaggccgtatgaacaatggactgattactccacaaaccgagcgcaaatttatcgacaccccgcagcgcaacttcaagtcgcctcccaagacagccaaggccagaatgatctcggaagcgtcagacgattttggctggaatgatgactcggatgacgatgagcttatcaaggcactatcttccagccagaccgagaccttcatctcgcaacccaacttccaccccgactccccgttcaagaccccccgcaccgccgcggtgacctcacccggaaagcgcaaattgggcgaaatcacaaatgataagtcttcctacgaccggtctgcacccgcgacgcctttctcatcccgctcctcgcgcaccgagatgtttccttcgtcggcggaattatgcatgacacccacgcctagcaagtacaacgatgtactctctgcggactcgaactttgacacctcggatcttgcaaagagtctactcgatattttggagaaacatagtgttgttttgccaaacagagcgcacgacgaggtgctttcgctgcttaaccggcaggatttgaagacacgggggattatccgtgggcgggatatgacgcggctggcattgaagaagaaggatggcgagattaagaagctgcaagaccgtgtttctaatctggaagctcagagggaactggatcgttctcttattgaggggatgaaaccctattgatgtcacctttggaatcggattgcacatccagcgaatactgccaattggcatttgcattcctactataattccggctcagtgttggtcccatctcacgaactgttatgatatgatagcttgcgacctgattattgtgttatcttctcagcattttgtacagcagggaattatgaccgtctttcatccatatatacaattagcatgcttaatagaaaatataagctttacccggccagtgaatgatttcgtcctacatctcacatgttaggattgtatagatctagataagacgtcacgtggctgataagaataaattatcgcgccgcaatgcgcctcgagcttccagcaaggaacaataccaataggccgaaactgaatactctacctccaatgacccccacagatgaagcttccaagcaggctactccctacgagatcgccgacatgttccgaccccctgtaaatcgtgcgatgcgcacactcgaccggtcatttttccgcagaaaggtgcccctctccgtcgcccgaatttttaaagcaagcgatatctcgaacgtgcggaaggagctggtcaagagccgcgacatactgctctggccacgcattagtcctatccgcgaggcgaaggatgaagatggcaaagtgtggaaggctatgttgttgcgcgagaacctgaagttggatggtaggtttgttgcctggatccgctaggcttgatagatacatgcatggaggttctaatatgtttatagataaggctacatggtcgcctactatcaacgagcttgtaaataagggaacggtcgccttggggccttatgaattggaattggaatatgaccattggtcgtacggtatgcttgacggatgttccctcggttcagtatacatgctaaccttctcatagctgagataatctcatcgattcttcctgaggacctggaagagattcctcaaggcttcactcaagtggggcatgtctgtatgttcgtctgagtcactgctataaccaatactgacgaaacagtgcatttaaatctccgcgcccaatacctgccatataagcacatacttgccgaggttcttatggacaagaacccgaccgtccgcaccgtcatcaataagaccgaagatgtcggctcacacagccagttccgcaccttcccattcgaactgctggcaggcgagaacgaccttaatgtcatccagcacgagcaggactgcgagttccggttcgactacgcccgtgtctactggaacagccgcctggagaccgagcatcgccgtctagtcgagaagttcgagcccagcgagatggtctgcgacgtgatggccggcgttgggcccttcgccgttccagcaggccgcaagaagatctttgtatgggccaacgatctcaacccgcacggattcgaagttatgcaagatgccatccagcgtaatagggtgcaagatttcgtcactgctttcaaccaggatggtcgggagttcatccgttcgtcgggtcggtcgttgctgagcgcggagccgctcactgttactatccacccgaaggtgagcagagagaagcagcgcaaggttgcgcaaggcaacggggtcccgctccccgcgccgaagatatacacccgtcctaccgttgtcaatcactatgtcatgaacttgcctgctacggctattgaattcctcgatgccttccctgggctctatgctggcgaggaacacattttcgcgcctaacacggagcagaaattgcccatggtccatgtttattgtttctcgggacactcaactgacgaggtggatgatcacattgatatctgtgagaggatctctgagcggatcggatacaagatcactattgatgactgtgtgggaggcaagggtaaccaggaagtggaactcgctattcacaatgtgaggctggttagtcctaagaagcagatgttctgtgctagcttccgtctgccgcgggaggtcgcttttcggaaggtatagagttgcatagctgcatgtgaggcgtttggacttctccacaaaaataaaactctgataccctaagaaacatctatcaagtattggtagtaataaacaagtagtaataaataagtacgagctgccttccatcggagttaaattgtattgatgaagcggtaccggggtcaccgccttgaactgccggaagttcaactgcagagatcgccaaacaagtcacctcatctttttacagcaaatacacggcgtcgacgaagtaacttcgggcaagttacttttacaaacacattcgattcgaagcactaagctgcatacccgaatttacggaatcccgcccttcaaaccacacaatgagtgtccaactacccccacccacacaccgcaagcgcgcgctgccacaaggcgagctcgaagccgcctccacgctcaagctaggcgctgaccaacacacacacactctctcgctatccgaagcacgactcgttatccacaaggtgttggagaacaagcggcgcggggggaataaatacgaagagccggagtgagtggacagacccgacgtcgtggtcggatattcaatacttacttgtgatgtctacaggaacctgaccaagaccttggattacttggacgtgtttgcccggttcaaggatgaggagaatatcaaggccgtcgagcgacttttgaactctcacacggaactggagatgtttgagcggtcacagctgggtgagttgatttgcactgccccatcagccaagacatgacattattccatgtacttttacctggatagattgactgactcgggtctctgaacaggcagtttatgttgtgacaatgccgaggaggccaagtctctcatcccgagtctccagaacaagatctcggacagcgacttgcaagaattgctagatgaactgaccaagctgcgcaacttcaccgagtaaagcatataggggattgcattttgaggatgtttcatttttaggagcatggagttttgacggtgttctttttttttttttcagtgatcgattgcaggatgttggattaacaggccataggtactcgggaattggtgattcataatagaaacctcccggaccaaccattgccgctcctttcttattacatcttctgccaagtccgtgctcttccgttcgccacagtagcattgagcatgtgccggggaacaggatcttgactccggggtgttccactccggtacaatctattttaatgtattgtattacatatcagattgcatagcggtcagtagaaatcggaacaacacggaggagatgcatatagtgcagatacaatatagtacatatagatagttagccgagtatatatctaatgtacatacaacatgtacgtacatagtcttagcctccctccacattgcgttctccccacacagttcgggcgctactgcgactttagtatgggacggacggtgattggcccggtggaaaggcgttatcactggccgctgattggcccgggcgatccttggacagtcgaccagtcagaaagccaattgacgcaggaaaaggacgaagggagctatgttgtaacggtgatatatatcattcgccctaaaccgccctagatacagtttgaccaaattcaatctcacttccatggatgccctacgtgaaatgatgacctaacaatattctgtacgtaatgcaatgtctgcattcagaaccaatcagcaagggaccgcttatcgttgacaattaaagtgtcataattgcccgtcaatggctgctcgggcgggtttccgttacgagagcaaaaagctgatcgtctggttgtcgggaaagtaacgagtttcgggattcatccatagtttatattacctattaggtcgatatgtcattgatttccctcttttccttccttctccctcacttaccacatctcgtaacggctaggaatgacggagcgaactattcgacatctcatcctgctgcagtcacttgcaggctcatccgcctgatatatctctgatctccggtgccggctctggattatcagataacacacctgttttccctgataagcgtatgtgccgggcttatcacgacgtgatccaatgactgacgccgtatattcagaaaaaagaatcccaagagattgcggagttacacgtctggagcacaactccgtgctccgtgaagacccttatcaccttcgatctccgttcctatttgcccgtgcctcagggctagctccggtccaccgtccacatggctaccgttatcactctccagccgggatattcccaaacccattctcctgatctccgccgaaagacgggctcgaccccagtgctctctccatcccccatctccatcaactcgaccctcccccgcgcacggaatggagccagctgtgacgcctgtctccgcagaaagagcagatgtgccatgaacgaaatggtcaataaatgctactcatgcgactttcatcgccaagagtgtaccttctcccacactcacgagggtccgtcgaagaagaggaagttggacggccaggagcctgcagaaggcattaagcggtatggcattccaaccgggggatatacgcctcgatatgtagaaagaaatcgtgccctaacaatccccagaccttcaatgcagcactgtatccccgagacggagtctcacctagcagtgaacatgattcgccccgggttttttaaccaatcaacccagtatatcggcatgaccacggagctggagcccaccttgctggattatctgccactggacgaatacgacgaatgcaccgtggccaactcgcgcgtgcggagatgtgccgacgacggcaccttcatgcgcgtcgtcgacaccgtgccggactcgcatgccgtgtcactcgatgctatcgagagcatggtcgctccctacggctccacactgatcgagaagttctttgagcacgtgcacccctcgttcccgattttgatagaggaagtgttccgccaatcataccgcgagcgccgtggcctctcgccgctactcctcgccgcagtctacgtcttgacgttgaagtttgtcgacgtcggtgtcacctcgcagactgcgcgtaagcccgatgccgcacgactagaggcttcggccttgaagctgttgatggattcgttgcaattccccagtgtatccaccatccaagccgggctcctgctgacacaaaagtcgactctcgctacggcatcgctaaacggccagctggtcacggccgcgttcgagctgggtctgcatcaggactgcacaaactggcgtatggagacctgggagaaaggcctgcggaaacgtctcgcgtgggcgttgtatatgcaggataaatggtcatcgctggtgcacggccgaccctcgcatatcttcgcgttcaactggacggtcaagcatctcgtggagcaggacttctcggacgcctttgcctccggcactgactcgtcacacgatgaaaccgccgtcggccacggccctctgcttttctgtcacatggtcgcactaaccaccatcctctccgacatcctcgaccggttctacaccctgcacgccatcgaggagttctccgccgccggaaaccagcgcacacgcatgatcctagaaaaagccaaaccagcccaaatccggctcaaagactggttctcctccctcccagcatccctcaaaatggaaacctccaccggcgaactcgtcgaaacaataacagacgaacacgcccgcaacggcgccctccacctcgcctacttcgccaccgaaataacccttcaccgctgcatcgtccgctccctcctcgccgaaggcacagaccagtacctggcacacatctgccgctccgcagccaaaacccgcctgatctccgccatggacttcgtcaaccgcctgcgccccgcccacctccgctcgttctggcccgcctcggcccgcaccaacttctccctcatcggctccttcggcatgctgctccgcatcaccgcgccgacaaacgaggaggctgacttctaccgcgtccggctgtgcgagtaccgctggacgctaggcgtcagccacaagaacgccgagttcatgggcttcgccctgcagagtctggacaacgccaccgcgctgcacaagcacgtccctgcgaagcctggtatcgccgagctgatggcgtcgtctggtaagaatgcgccgccgcgcatgcctcctaccacgcttagctcttatgatgacgctatgatggaggctgctggcacggccgcttcgagctcggttatgtcgggtctggcgtcgccggctacgtctattagtgatatggaggatggggaaggggaagcctctatggcgcccctatgatgatgatcccgtcaacctctctcccatctcttctcctctcttctcttcatataccttactccgtcccccctcgcatcccttacctcatttccagccctttctttctttcgttgatgtcttctcacgactcccctttgctacggcgttttctccggaatttgatcttgttcttgatttcctgggatgaagcgcctgatttacctatttgaaatgattgattatgttgtgcatgtacccccatgtactcactgcttgccttgccccgcagcgacactaaaattcgttacctactttttgctatgacggaattaccctggctttggaatgaatgcatatatggtctggattggaccggattttgttatgttatgctatgcttgctttgtttcggggtttgttttcgccattgttattgttattagacagcctatgtatatagagtggatgatatgaattatgattttatttgacgatcctgttcgaggacgacaccactcaataacgctttcatttcttgctcttcacgctcgcactatttttttggttttcgtctgtggcggtgtgtggttgaacacaacgataccgtaacaggcaaaggcagaccatccgatgctgactcgatcaggttggcgtccgttacttgccaaactccccagagagagatggaccggggtttgcggatatcatcgagtgttggccagtcagactgagggatcctagtaagacgactgtcagtaatgctcgtagataaaggaaaaggaaaagaactcacattcgatacgacaagaatcgacttgtccgacgggatagttatatatggttgccattttgagtatggcgtttgtaggacactcaacacagctcctcatcattggcagcgaactacttgactagctgctggtgctggtgctagtggtcttagtcttggacaggtatgttcgggcgcccagacgtgttggtgtgttatcggagctactgcagtgatatcattgagacaagctttcgtctccaggtgtcttatcggggttgttggtgtcaagactcaagactctgggatggtattgtcatatggcaccatcgactatggttttagtcacatcaacttcagcacatgaatatggctgctgcatattgcacggctggggcatgggtggagcaagccaccattgttcaaaatgaacagcggtcttcttgatagatatgataaccactatgtttgcttctcttagaggctctgaaccatcatctagatttcgaagaagtcattgcaggctctcggataagcccgtttcaacaacaacggtaggccattgcaagctggtactagaaggccaacgtgaagaggggctgaacagattgtagcccaattgggcagtgttgttagactgttgattgttggatttggatggtcttgagggaagactcgaggttctgactttgtcactggatagacgtcttgggtgcgatccgggccattgacgacttcaagcgtgttgatatcttcagcttgagtttctgtgaatcatcagtaaatatatgatgatggtttaaaggaaacctgaaaggacactcaacaggacctgaagaaacatacctgaaaggattgctgaaaaggtccaacgaaaggatgatgggtgatgggtaattggtggcgcggctgcagcaccacctaaatagatatatgtagcactggttaccagtgccgcaggatgagatggattggaatcctttgtgtcatttggcagtcgggctgtttcatgattagctagagatacggtctgaaggtggcactagccatgacatacatagtagtccgcgtagattgcaaggaaaggcagaccaaatgcctagagaatgacttgggtgacccattgcccatcggtctctctaaacatcgctcgtgaagtcgaaatacgttggtcaatgcgggtgtcgatgaaaagaaaagtggaatttggggacccttctcgaatgagatactcctagaatgactcggacatgctactagttgttacactggtagcaaaggagggggagggggagggggatgacgaagaagtgtgttgaagagagtgaagagagttggtagtggtgtggtgaaataagagatgtgaaagtgaggataaagtgtggtcacgtttaccttaccttggtcttgtgtttgctaagtgctagtgtatttgctgtaattggtggtactaatagcagtcttctctcagtaataagcgacggagaaacataggctgggatgatcttgttcatttgatacgcttggtatactcccaactaaaagaaagagaactcatttccacctccaaaggcaaaatcctccaaaacactcggatccaccaaattggccagcatctccgcccgcgttcgatcaggttgtgtctgcgtgccgttgctgaagagtgaaaagaagaaatccccgtcctctggatcagtatgttggtccataatagatgatggggtgtcgagggataatccgtgcgtgggtgtaaatgatgccgctggtagaccgacctcgcctcctgttggcgttgaatttggaattggatgcttccgcgttgatgtggttgcatctgcagctgcttgtgatgaatttgagactccccctgatgatgatgtgtatggcactccgagtctagagtactggctttggttttggctgtcttcgctgtggttagctccataggcagagcgccgtcttctagccagacaagtgcgcgcaacttctagtacttcacggagcatctcggcgcagcgacgggcgacgataatatcgcccatggaggagaagatctcgagggatttttcgacgtcttcgaggagttcgtcgtctgggagacctgggtagtttgagaggatgagatggaggagaatcattgacccgtagagtgcgtaggttgtgttgtaccacctgtttcaatggtgagtttgttaattgtagtttcttaggaggaaaaggtggtggctgaccatgtgcgaatgtagatcctatgcatgaatgactcgtattgcatattgatactcatccgggcagcattgaggcaagtatgtagatgggcagaaaggtctggcgaggaaccgtctgtatttgcagttgctgccaaaaggaatggcttgtggatgaggattcgagtattgtaatatcctagacatggtacgatcaggattctttctaggatctgctaaatcggagcacggatcatgtagagggaactcactcagccttaacaccaatttctgtttgaacgcccattcagggtcattcaatgcaagtgcatctagatccaagaaagccggcagtgtcgccttccattcaagaagtcgctggtcaagtgccatagccagacgggacttatcggctattgaccgccgcatggagtggtacagttgatgagatgcttcagacatgatctgggctagggcaaccatggccgggatcatcgctatgtcattgtcttcggcatcagggtcgaagtcatcggtatcaacctggtactgtcagggttgcaccgtgcgaattgaggatggcacctacttttagcttgggaagggaggtctggtaataatgcaacgctttcatgctatccaggcgtccagaggaacaacacatttctctaggatcgacgttagtatcatcttcgggagtacgatccacgagatagacgctcacatctcatgagagtagatacacctaaatagaagcgtcaggttttttattcatcctagctttatgttcatgcttaccaccaggtacgcctagcttctcgtctcgcactgggaggcagagaagacatgctcgaaccgagaccaatagccgctgctgtgcggacagccatcccgctatacatataacagctatggggctgcaacgaattttgacgaaacacactctaggaagacttgtcagcctccttctgatgtaaaatcgacatggacgtaccaaaagaaggagagactgggcagactccaaacaggaactttcaaaaagatcacccagagtccgttttgcgaggccgaagaagtacttcgcaaagtcaagggccgtgaaccccggtcccccccgagctcgtcgtgtttgacttggatcgacaaattgctgacagaaatgttgtagtaaggaggtctcgttcgagcttgcattgatcgcgcccagagcaacgaccgcaaagtatagcccagcaaatttcgtggtacctcggaaaagtccctggcgatttggaactgaccatgcttcattttcacatcgttgcataaaagtgcctttcgaaagtagtgggtggatgtaatgcttgttcacaaagtagctgctgatgaaggttttctcgatctccatctgcgcactctctgtaaggcggggaaataaagcttctagactgatgtcttggtctgttaatccggtcagaaattcatacgggctgtgataggcattgaaagacaaagggaaatctaccattattcactggaggggtcctgttttcgagaccatctgcatctggcggacttctctgtgctgcaaagtctgtcccatcatgggattggggcgaaggatgcccgatatagtctgcattgtaaagtaaattcacgatggagagttgtgatttgcctgacctcctgctacttttgtggctcgtttctcgcgataaaggctgagattgaggattagtataatccggtgacgccggaatttgtcgaggagtctcatcgggacgattttgatatctgagctcttgattctgtgctcttgcgtatagattacccaggaatgccaggtttgacgagttaccatagaactcggtcccattagtatgcagattgaccccacttagcccatctcttgacgcagcatcaccttgctccgaatttggcactatataggtggtcagtttagttattcgtatcggagagggcggtgcccactttgtgaagcgtcggatcgcctagccgacgggatcgttgatctgggtgggttgttgacagcataaggtcggcccctcaacaaacttggagactgggcctgcgaagaagcagtatacggcagtgacttttcggggtcgttcgtgccttttggtgtctcggtctgatatatccccggccatggagatggcctggcgctactttggctttgcccctggttagagatgctcggaaaaagatttgatgaaaatcccaacctttggtcggattctgcaatatctcgttttcttttatttgaatcgatgggggttccgcgcccaccagacgtgcggaatacgcagtcaaacgagtgatctgtcccgggtcaactactacctcggcatttcaatacgtgggactaatacatgcgcaataagaacatggttgggcttgatcacactattaattgtcagagtggacttgctttccgaaagggaagctaaaaagagactgcaatttcaatgtgagctttggcttaccttggtcttccgagcacggcaggtttcacatgcccgcgaggcccgcggcgcacgacgttgcgaggcccatcgtgctttgccttcaggcgcgtccatgcttattatagatctctgcactttgagaagcggacggtgatctcccctggcctagtctaatgagaaagaaggtgttggcccgagtggaagtggaacacccctttaccgaaccaatcgccaatcttcaacttcttcactttgcgtggggattttgcggggtctggggaaggcatttggtgttaaggtctgtttggaaaagagaatggaaaagggaaaagaaaaaaaatcatctgttatgatctcactactactgggatatacatctaggacccagccatgatccatatgagaaggacagctacttcctatcgttacagacttggaatatagtattggaatattaagtctacttaactataactagctttgacttttacttattaaagaataagtttgaatgatttgaataccaacaccaatgtcccgtatgctgttccgacggaaggcgatcttccgacggatgatatccgatatactttgctcccagcacattcttcgaaggtatagttagtatagagtatattatataaaagcttaccaggcagagagtagttaaatagctagtacatgtacgcagcggccgcagcctgactagagaccccacggaaactcttgcctaatgtgcggtgtacttctattaggtctacatataaaaggtacacccggccaatcatgaatctcttgactctcgaaaacagaataattgtacactcggaatttgaatcgtgagcatttaaagagatctcttctacaatagatgatctataaagaatgattcatatagcatgaacattttcggaggctgttgttgacccttcgttctaagaaactgattggccgtaagtactccgtgccttgatatcttatatcaagcaagagtctccggttacccaacttcctatatttaaacatacaaatcgagtgcaactggccaaatgcggacttatctccccgacggaagccgttagatagcgggtaaacatggcgagttggtatcagctgctttgagtcaatgcacctccaacttccaaggatataaaatgagcggtctcttctttttgataggacattttgtatctaatacttactaaatattataacatacttcttcaatataacgtgcctcattcctcactattgatccgatcagcattcacaaacctcaagatggccttcgatcagaacactttgcgatcgcgcttctgtcatgagctttcggaaatgtacaagagcgaagtccctctttacggcgatctgatcgatgtagtctgggaagcagacgcaaaaacagtccaaaacagccagaacatcgacggtgctcgcgttataaacccagacgatattctacccgcccggcatcgggttgaaagacacggagcaatccgactgggaacagcgcatgagctagctacaattcgtcgcatgtttgctgtgatgggcatgcacccagtgggctactatgacctcagcctcgctggattccccatgcacgctacggccttccgaccaaatacccaagaggcgctcgataagaacccatttcgcgtgttcacgacggtcttgcgaatggatcttttgacagaaagaacccggaaactagcacggaaagcgctagagcaaagagacatcttcacgcccagactgcttgctctgttggatatcgcagagagccagggttttctgacaccagatcaatgcacagagctcatcagtaatggtctagagacattcaggtggcactcaaaagcaacggtcagccttgaagaatatgagcagcttaaagctgagcatcctctgattgcggatgttgtctcttttccaaactgccatattaaccacttaacgcctcggacgattgatatcgatcttgtacaacgattgatgttggatcacggcatgcctgtcaaggatcgtattgagggaccgccaaaacgatcgtgcccaatccttctgcggcagacaagcttcaaggcgctggaggaaactgtatatttcagggatccgtctggtttctatgtgaagggctcccacaccgcacgctttggtgaagtggagcagcgaggctacgctttgactcgagaaggacgccatctctatgatcgaatcttgaaccaagtcaatgcagaagctgcgaaggatgacttgaaaggagaggcctatgacaggctactagaagagcgcttcaaggagtttcccgatagtctatcggaccttcacgatctgagactgggatatttcacctatcagttgacaccaccgggcgatcagtcggttaacgaaagcgttgtattatcggagcaacttccttcaatctcacttcaggatctactcaacaaaaagatcctgagttatgagcctatcacatacgaagacttccttcctttatccgcaggagggatcttcaattccaacttgggtggtgtctcccagtccaagcaactgataatgagcgcggatccggacctcgatggtttccagcggctccttggggcatgtgttgccgatgagttccatctatatgccgagatgcaacagaaatcgttggaaatctgtaggcagaaactgcagttgaagaagattatagtgtaggataagcgctttgtgataatgtgataatagcatctgtttcaatcttcagacaagtagttggttgctctttgatattcacgtttatagcgagcatcactaatggcatcaatacgaagtatcgctgctgcttcacttctacctcgttttcggtgttgtcagatgctttcattaggtcctccgggcctcgacgatggtatgccagtgtatggtttatgcatttgccgagaagactgcgatgagattgggcttgaatgaaactcagcgttcatgtgacggtgacgggccctacactattgcaatagagagatcttcagaaaagttcaatactatagaatacaatgcatacggaaaacagccatccatctatctgtacaatatgccgcaaatatatcaatgcatcgcggcaagacaattaccaacagcccaaagatcagaccatatctcgactagtactgtcaatacctcggaccactgtcgtgtcatggtccggcatcagattttgccccaaaagcttctcccaaacaccgaacaacccaattatgaccggggttcaattactgagctgtccgctgcgtcatccacgatcaccgcgccttccgccaacaactcatccggcgtcttcacccgcacatccatgacacgcatgagcgtatagcggtgcttgctcttggcctgcttcacgtgccgttgtctccgcttggtcttctccttgatgcgcagcggctccgcatccacacccgtcacacgaacgcggcactcgtagatacgctcgtcgatagtcggtgagcccttcattgtgaagtcgcgggatccgagtgccgaagcgcggttgaagcgcagaatatcgcctgccttgaccttaggcatgaggaagggcaaccggatgtgatcaccttctgtcaagaggtatggtcgtgcgtgcagttgagcaacgatgtagtgcggcttctggccggcaaggtggggaagttgtgacatgagagatttggtcacttcgagaggggaggtgaaagtcggggcaacgggttgttttgcgatgggaacgtgtgcgcgtgtttggggtgtcatgatggtttcgtcaaaagtgggagccttgacacgagtcttcggttgggtatcttgcgcccggggagtggcactgagaggtgattccgggtggctggaagccgattggctctgaggttgcgagttcatcaaagatgcactctggtgaaggcatgctcgttgctgcaggggagcagcggatgagattgtagatggtgcagtccaacgcacttcggaggccaggccccgtagagcagatcgtgagaacatagtaattgaccgcttgtcaatactcaattatcgagagtgagagtggttcgcagtggtcgatattcgagatagaagagcggcatccccgtaactagagaaattcaacttgcgcgaatggccgctttgtcgcccgtagcatcacgtgattatctatcagtgacttgaggatgcagatttgcagcgagaagagaccaatattgtaataataaatgatataacctgatagaaagtcagttgccttaaatgttcaatcttctaccattgttcaatatttctttttcaatctgaataagtcgaagaagtcgagaaacgaccttaccgataaggagcatcacgtggttcgctatcttttcccgcatcacaactttttcggtctcgattagatcttcaaggcaagaacttcctcccccattcacctcttgttgtccattcgtcgttcatcatggtaagctccaaatgattctctgacctctcaatgttcaatttcttcatttactaactttttttctgcctatagcctcagaacgagttcgtccctccccgccagccaccgcccgatctccaactgacattttcccaggtatatcgaacgctggcagaagcagcacggcaagcgcctcgatcacgatgagcgcttgcgcaagcgccaggctcgtgagggacacaaggcgtcccacgatgcccagaatctgcgtggtctgcgggccaagctgtaccagcagagtcgccataaggagaagatccagatgaagaagcgcatcaaggcccaggaggagaagaatgtcaagtccgccgcgcccgacgagccttccaagactcctctaccccagtacctgctcgatcgctcacaggagaccaacgccaaggccctctccagtgctatcaagaacaagcgtaatgagaaggctgctaagtttgctgttcccctacctaaggtcaagggtattagcgaggaggagatgttcaaggttatcaacaccggaaagaagacccacaagaaggcctggaagcgtatgatcaccaagcctacgttcgttggtaacgacttcacccgtcgccccgtcaagtacgagcggttcattcgtcccatgggtctgcgttacaagaagtgtaatgtcacacagtatgttttatctttggagggagagcactcaccctccggttcatcttggttggatatggtatattgactttttcttcagtcccgagctggctgtcaccgtgcaactccccatcctgtctgtcaagaagaacccccagaaccctctctatacccagctgggtgttttgacaaagggaacaatcattgaagtcaacgtctccgagttgggtctcgttaccacttccggtaaggttgtctggggtaaatgggcccagattaccaacacccctgagaacgacggctgtgttaatgcgtgagttgcttcgatcaattattctattctttatatacagctcaaactaacgtaaaatagggtcctccttgtctaaattgaccacaagcacttcctccacattcccggcaggcacccgcctgtcttcgataccatgctcaggcagttctatatttccctttcttgatacatacggtctcaagactgtttcattcttgggcggtgttaatggcgcaaagtcaagtccattgatttcaaacgaaaagtattccgcatgtttggcttcttaatggacatagctagtttttagatagtcaggcatttatcaactatgattttatgaagaagcagcagctccattgtaaagatcatggatcaaagacttccaaataacccacaggataagaaacgcaatatccaagtaatgaagatagacaaagcttgtcaattaaacatcttaaccaaatgaggagttattgtcactccaaaaacgatggtactcaagcagtatccatccggatgcaggagaaagatgaaaaggctaatgaaatcatatacaggaatgaacatccacacgctgcgctgaaaccgaaattcgtcaaaatacccaccacaagacaacgtggttaggtcggacaatcaacccggaggatgatgaagaagaaagagaagaaagagacaatgcaaagaaacagacaatcagatatcccgcaaattaaccaagcagaccaagacagaaagaaattaatatatccaacaccagtcattaagtcgttctaaccaagaagggatggggaaaagccgataaggcattcaagacaaaggaaataaagtgaaggagcggctgggtgttatcatgcgttttcttcttcgagggctgctttgatttttgcaaagaagcctgcgggccatgcagctagctcctcttctctgggcacaccgcgagccttgcagtggttgacgacgttgaccaggatacgaccaagcatatcctgggtgactgggacagcaccctcaagctgggcatcggggtgcaagaagggatcgcgtgggccaagcatctcctcaatagttggtcggagagtctggtcacgctgcagacagcgcttgagagtccggacaagaccagggggtactggaatgccaccgacaccaaaggccgggaaatcgatttgtacacgggggttggggatagccatgatgcgttcataatatttggcgatcttggcgaatggtggttgtccgtagaccatcttgtacagaatacaacccaaactccaaacatcgctgggttttcctaatttcataacttttccaagacttgaaggcagaccgagggacacgttggaatcaaccaacgcctcgggggacatgtaattaggtgtaccgacttgctgttcacgatgaacgttgactgtattatcttggatcgcatttgcaattccgaagtcaataagcttcaaccggccttgaaccataaggaaattagccggcttcaaatcggagtggacgatgttgtgctcgtggacagcctggacacactcgagcatctccttccaataaaatcgggtaaagttgatatcaaaaacagcatcttcagcgtttaaacggtatgtgagaatcttttcaagatcagactctccgatctccataagcagactcagagcatgtttgtcattgttcagctcccagtcaaacaggcgcaccgcacggtccacattctccaacttcttcaacaggtcgatttcgcccttatatccactcaaagtcactggatcaacatcttcaatattgacacgcttgagagcgaagatcttgtaattctctgccatcacccggtagacacgggagctaccgcctcgaccaatacaatcgagtcgagtgaaatgcttgccattaattgagacttgactcttcttttttcgtgattgtgatgtcgatgcgcctcctgtggatgtggcagtctcaaggactgacattttcggaggaggaggagcggccctatggggggtgttgttgcttcgcgtggcaagtatctttcgtgcagagttggttgctggggtctctgctatatcgttcttctcggtatcgtaaacaacatgatacttttcgggtttatccagcatactcaacccttggggctttgtacgccggaaagttggtggtggttcattctcttggtcacgtaccgatggcaaagccggtattgaaggaaccttgaatacaggttgttccttcgcaatcgaggatttagaggacaaatctgatgaagcgggagtggactttgagccgtatgattttggcgaagatgacctcgaaaacggcccttcgacctcagcagggcggagaggatattctcgtcgattggattcacgcacaagaggcgggcttgggtcagcccatgacactttaggggatgaaggctttgctgaattgcgaggtcggtattcggcattctcctcctctccttcgacatcttcccggacaccatcagctgagagatattggtgattttcctcgttactctcttcgctctgacgtcttagcacgcccctccgggctgggccattcaagaaagtgccagcaagccgaccaacccgcttgacacgtaatgagctgtgtggagcgaattcttcgccgccacggccccgcagtgcagaagaaacgccatatcgtagcgctgggtcatcttcatattgcgatttccgatcactatccgagcgctcggcactaccatagtaatcgtccgaactgcgttccgacgagcgctttcctgaaggcgagacagaggccggggatcgggtgttgctgcgcgaaacgttgatacgaacactccgttggcgtggggcgggagtgataaaatcatttgggcggctatggtgctctggttctgcgctctggctatttgataatggagagccttcgcgcgagaatcgcgaactcgacgacagagcccctacacggacgactcttggggccggactaccattagatgagtcgtgtggggacgaattccggggtgagcggctttgatgtcttgatgtttcaattcgaggttcgtgtacgtgtgccttgtgtagatgaggcgaagaacctaatccatctccatgcaacaatgcttttacagaagcgctgaatttaggttctgggacctcttcgtcggagctgtccccagagtaatgtttggacatagcttgtgttgaaggagatacccgtctggaacccgagcgtgaaaccgcggatcgggacatcggtcggggtggctgtcggtacagttcattgtatgctgggaggaaattcggggatgccatgccgctaatacctacattgaagttgtgaatcaatgcggccccctccaaagttctccaaagttgtcgattgtttgttgatcttggagaaagcccaggctcggggtttcttcgcgggcgcgctatatagtcacgtgcttgttgttgctatggcgacgtctgcaccacaacatgcggacattgaaataattgattctgggcttgaaaagaacattgaacacgaaagatggatataactctagccaataatagcccatttttctctggtaatgtggtccagtaccttaagtgattccaaagccttgggcagttaaagatcggccagatagcctccacttactgctatgtctattccgtagactagactgaacttgccgttgtcgtactctccggctatcaggattcagagtagcctagtatagctttggggtggttgaccataaatctatataactactccaaagaatgcaaaattgtgatatcctcttagattatatgaccttcatagtgcagcaagattgtaaggaattaattctatcactctatgactgtaaaagtactacagagtggtgagttcatacaatcatagtgatcgttcattagggcacatatatacttcaagaaagaaagataaagaatcagcttagcataccattttcttctcattttcttctcaaagaagatataagaaagaaagaaaaaatgattgcagacaagtataggccaacagattagccaagaggcgtttttccccacgtaggtaatggatgtcgatgttctgactgtgttcagactgtcggcgagttcggaggcgaaatatccatctacggcaccggcgagtgaccatgaatgcagttccaacacggtgaatacctgtcttatgtttgctcatcaaggactctcctaccctcaacttggattctagcaaaaatggcgtccagcgtagatgccaagctgatgaggcggactaagttcccccctgagttcagcaagaaggtagatatgaccaaggtcaatatcgaagttatgaagaagtgactttccccgggcttttttcggtatctccggtttactgacattgctttttctccgcccacagatggattgcaagtcaaatctccaagatattggggaacgaggatgacgtcgttatcgagctctgcttcgcgcatcttgagggggcacgctacgtaagtggtgccgtcggatatttagtgtcccaaccctagtttgctgacatgtgcttctgttctagcccgatattaaatctctccaaatccaactcaccggatttctagacaaagataccgccaagttctgtcaggagctgtggtcgctgtgcctaagcggtcaggccaatccacagggcgtcccgaaggaactcctggaagccaaaaagcttgagctcatacaagagaaggtgattgtaagcgtgctctcgaccttggatattttctaattaaattacattacagctcgaggccgagaaagccagcgaggcacttcgtcgccgacgcgaacaagaccagaatcgcgaacgagagctggacgatgtgagacgccgcgagcgaccagaccgtggacgtggaggaagaggtggcgatcgtggagatcgcggtggccgtggaggtcgaggacgcgacttcaacagacgattctcgcctcccagagaccgaaaccgcagccgcgaccgattccgtgagcctccattgcgacgcgacttggactcctacgtgccacctggtaatcggcgccgccgatcctctcgctctccccacggcacccgttctccatctggaaccccaaagccgtcgtccccatctcgccgaaaccgcgacgaaccacaccacagacgacgcgaacgcccaagcatctcagtctctcccgagcgacgccgcggaggagcgagaaggcgcagcagtccggattacggtgaccgtgttaaagcaagacccatttcccgcagccgttccccgcgctcacgttcccccagaggaaaccgccgccgaagctccgtctctcgcagccgcagtgtatctcgctcgcgatcccgccgcccgtctggacgttatgcccgccacgattcccgtcgcttaagtcgcagccgcagccgcagccgcacccctgaccgtaccggtacacgtgatcgtggtgagaaccgtcgacgccgcagccccagcggtgatcggcgccttagccgcagccgcagcaacagccccaagaaggatactgacggcaagcggccgctctctgtggaaagagacaaccctgatgacaaacgacgcaagatggctgatgagaatgaggtctcctctacccgaacccctccgaaagctgatgagccgcccaaaactgatgacagtgagacaaaagttgctgagcaggttggtcattgagaatagagattcctggtcaacctccaccttgtatcctttactacccagattcattcctatttaatgttcgtctaaacaattcacatgtcatttgtttctcaaattgctgtgttgaatgatatactaatgaaccttcaacgctcagactaagaaaccgctttctgtttggacacagtcgactgcattccgtgagaaattactccgggagagatgtattgctatgcgtcgtcaggctgcccagaagccgagcagtgcctcacagccaaagcaggactaaacgagagcacgagtgtgacttgaacgttgaaatttacgccgactaaatgagtgcgttttagcgcggtacatgtgcggagtactttaccattccaattattcttttatcatgatcgacatgctcttttatactgtaaggtggaatgttgggttgatactggggaaggtgacagtctcctaaattgtagctagtcttagccaactagttagtgtgatgagtagttcagattaagatgggaatgtaatatgaaatgaacatgatcaattacaagatatccgaagactctaaccataaccattcaaaagcacagtagattacgatgtacgatatacgtaagaaacaggatatatcaatctccaccgaagcagattagaattagaattatatatctacagagaggccagaggcggagagccggcagatcgggatgggcagccaccaccccacgtgttatcaaaaatcatcttgtcatggaaagggctcaaaaaaggcaaattaacagtattgatgaaggagaatctatatgagagccctcagagtcgtggcttcggaattatgtccaggtatattggtgtctgctttactcgcagccgcagacggtggcagtgacagtcacggtctcagtggccttgccggagccagtgttaccgccggagggaagggtggcggtaacagtgacagtctcggtgacattggaaccagtgcttccaccgctggggatggtggcagggctggtaggggcaggggccgatgcagtgacgccggaagcaccagtggtagcagcggtgccggtagcctgggcagggacggtgacggtcagagagccggtgccgctggggtgggggaccacgatggtggtggcggaaccgctaggggcagtgctggtagcctcggcagggacggtgacggtgatggtggtggagctggagccgctggagccggggatcacaacagtggtagtcgaggcactaggggcagatccagaaggaacggagccaccgacaacggtggtaccggtgggggaaacgccggtagcctcggcagggacggtgacggtgacggtggtggagctggagccgctggagccggggatcacaacggtggtggtcgaggcactaggggcagatccagaaggaacggagccaccgacaacggtggtaccggtgggggaaacgccggtagcctgggcagggatggtgacagtgagagaagaggtgccgctggggttggggaccacaatggtggtagcagaaccgctaggggcagtgccggtgactgtgacggggatggtgacagtggtggcgctggagccgctggagccggggatgacaacggtggtagcggttccggtagtggcagatccagcaggaacggaaccactgacggtagtgccggtaggggaagcgccggtggggaccacagcagggacagtaccggtggcgatggcagggatagaggcagtgagagaaccggagccgctagggttggggatcacagtcgagctgacaatttccgaggtctcggtggcacagggggtgctggtggcatcggaaccggagggaacagagacagagccggaggcggcgggaacactggcggaaacagtcagaccaacggaggcactggcaccggaaggcacggaggaggtgctggcgaggtagggggtgctggagggcaggctgaggacggaagacgaggcagtggcggcgggggcgccggggatgctgcagccggtgaaccactcgatgataatgatctggatgctgacgtcgatgttgagggaagtgcagccactgaggaaggcagcgagctcagtacgggcgctgaaggtcaggtcaaggaggctaccgccggcagcgcagagggaaagggcaccacggaggtcgacgctgagatcgtcgacgatatcggtcaggagaccagtaacatcaccgaggacaccatcaacaagattgagcgcaacggagacatcagcctcgacggcgaaggagagccaaagaaggacgacagccttgagttcaacgcccagagagcagtcggagctggcgagccagatggcgagcttggtgcggacgtcaagttccacagcggtggcgagttcgcccttggcgcatgcctcgagagcgagcttgacatcagcaccgagagcaacggcgagatcaacgcccaggaaggcggcgagggaggcctgaccgccaacggacaggaggccagactctaggacgtggatgccaacggaggcaccaacggagacggtggagagagcagtgtcagcaagagcaccaatctcaacaagttcaccaccagcacggccattgatccaggcaaggaccgaaaccttgaggtcagcgctgagctcacactcggtgctgttgagccaagcaagcagggaagccttgatgtcagccgacagactgccgacaataccaccagcggcgcagacattcagaccgaccttgatgtcgacatcaaggtcaaccttagcctcaacccaagcggagagggaagtctgagcagcaacgctcaagacaagagcagactccaggctggcggcctcgaagataccgtcgatagtcacgtaaagctgacccttggcggcgatgttggcagatccggggatgtagacggacagagcagcgaggacgtcggcggagaggactagctcgtcatgaccgtcacaccaggcgatcagggaggtcttgagggtggtgtcaatctcggcgtggagacgcagccaaaccttgagggcggccttggcctttgcgtggatggcaccggccttgcagccgagagcaccacccgagagagcggcagcaccctgggcactcagaccagcgaagatctcaacggaggtgccttcgaggacggtactaaggataccagtcacgtcgagggtgaggtcgccgaggagctcaccgaggagatcgaggttacgggcctccacagccctatcggtagggtaggcgagagccgagctggccagaccggcgagcataacaagtgaagaacgcatgtcgagttttgtgtggtgtattaatgaatgtatagggcaaaagcgattgggagtataacttctgaacacggattatacagaagcgaaagattggacaggcaggcaatagccgccaaaaacgatagactggaaagactggaaagagtggaaagagagaaagacagttgaacaattgaagatccaaagaggtgatcgccatggttgtttatatacccctgatcaactgtgagccgggaggcttccgggtgtcgattgggagtaccgcgttaggacagcctctactggctctaccccggtctccaagtccacatttggagctatcgaccccttagacttccgggatattggaggtagaaacttggaacctttcagggccaagtggagaacgacttctaaggctaacaaccggtgcaataggtgtattaccgcatggtggacttccatccggtttatttttgggttccagagcaaaagatatcacattggcacatccacaatctggatcttaactgctccattagggttattgagatagcttgagatagaagatgcccctctgtatccgtaatccgtacaaaatccaattcggacataaagaacgaaaaaagaaaaaagaaaacatgacaagaaaagaaatctgccaagtcataaaagggaaaagatcaccacgatcaaccgacggttgaaacgttcgatcacttttttttagcgattagaacccctttctcgtctgaactatatcgtactctgacatgtctacgatgtatattgtatagagttgtagaacactacgccttacagcttccaaatccaagtatctcaatctcaggaacctaagaagtatatgcggcattccgagtggcccgactctcctatgtcccaccgcgccggggaattagtcccggcacaatatgcacgctcttgaccacatcaggcaaagatggacacgtccaattctggtcaaccaagacctgtcaattcaagatttcaagattcaaggctattcacggcgtggcgggcaatctgtcagccaccaactcaaatatggtctaatctttgtgaggtattacaagaactatatattggccgtgaatggatttagttcatggataggatatggaagcatgttatatgtgttgggacagacccaacacaaaaacaagggatagcatctaggcccttccagtcttgttgcctacactagcaagacgccaccccgtcttgaaatgttactggaatatgaagttatgcagttcatggagaatctccacttttacagccaagacaaataagaataatctattaaagatagattaatattaattaatatcgagaacatgctcaaaacgagttgacctgcagtctgcagagtggagaaagaactatctgtgaaagcgcatacggagtaaattaaccctaagtacggagtatattatagtccctcgtacttgcattctaatactcgcgccaggacattcaacatgacagcgaaacaggggctgtcaatggctcgaggaataacctagccattgaacttctcttccatgctccacacattactccgtaagtagtgtagtgatctgcaggagcccaatatgtctcaccccacgcggacaagccccacgagcgccacaaacagcctctgagcaggaaggatgaccttcccctgcgcgttggaaattgcgctcagtctgatttccaagaggccggcgagatcagatgcagcattgcaagctgcagtccagctgcagctgtccggcctatgttgcactgtcacgatcagtccatgcaggagcctatcttcgctacgaatatcgcagtgaaaatggccgagctcaaatatccaaagtacgtgttgtcatccctgagtcaatagcccccctgatcctccatgcaataatcctagttttgccaacgcaactcttaataatatcggacatacgagtggtaaagacaacatccggtctagaacaaagaaaatgattccaaaatgtaaagttccccattcggtaaggttcaactagtccgacgcctttcttcttagttgtgttagtctttcgctcggaatgattggccgagaataatatcagaactatattccatagatacgacgagctatctattggctttttttactaaagttcagtctggttgtgatagttagttattgaaatcgcagaatgtgtaaaaccgccaaactaaagacttcgatctctcatatgttgcaccgataattccccaccccctcggagagtgtcggatgttttagttaccttacgatcaaccgaaagaaaaccccagcctagtgctcagtcccgcggtccagcaagatcaacctccttgaaacagttgctatttttgttttcgacgatcgcacggctaaccgatgatccaccagttgacagcaagatctcatgaaacacctcaaagttcaaagctataaacaatttcatgccttcatgcagcatcatgcagcattatccgaaattttgccgtgggtgggttgcgctgagccgaatgcaagacatcgtgaagccgatggcccccaattcccagcttgaaacaacgcccgatctggaaagtaggcacgcttttggaaaagaagtgcattggggaataaatctctcatactaatgactcggttgcaagttccccactgtctaggacacattgctggcagggtagatgactccaactatcactaatggcaacgtcctcgcgtaggactcggaaggattgctcggttgtgctgagatggaagaagcaggaaccgatctgttcctgcagttccggcccggtcttttcatgtgattgctgtatttatattccgatgcaatattactgccgaattggaaataatgtcaaatggttgacggaatgcaccgatgaagacaagacgcaacgttgcataccatgtcggtattacggtatacactacgaagactggttgttggaaatttggtgtctttttagagaatgttcccttccaatgttgtcgaaaaatttgttgatatatatttcgaggtgacactaaccttgtgaaaaagattatattatttaaatccaaaatcccaccattgtcttctatcattgcatggcaaaggaaagagtagcatcctaatcaagaaacccaagccgagttctcgatctgacctagcctacttcggatccaagtagcaaacggtccgaagaaatgtgtaccactattacccggccgttcacaaatcgccagaagagcccggtatcgttccaacgcagatgttgaagtggcacaaataaccttcgccagatcaaccggacagagataaggcggctgccttgcgtcttcgcagatagacgcagtgccttgcattgagcacgcgtagtacacgcaatggccaataccgaagcagtgacccagttcatggctcgctgtccgacaaacgcgacctaaccagagtgcggaaagtaatgaaggcgatgaatctatctctgggagggagcggtagaatgatactgcatccttcacaggtccggtaagctccgaaaacgaatttttttgtgatcctcggctattgaccggaggtcttttctgtctcttggcagttggttctgccgaagcacatgcagacatagatttctcacaatgagatgcaggccatgcatggagacgctcgacatcttgaatagaatctagtatcggattatatcttgcactggataccacggcaacgcgacttcccccgtacgcgcggccacatacgaactcgtcatcatcgtcctcgtagagatcgaaatccacaattatcaagagggcatatgcatcttttggtaaaatgctgatggcaacatcgagaagatcgtctagattgacttggcccctatataccccatttgacaaggtacgtgagcgaacccgcacgcactcatcgccggattttagacccaggtattgcaggcctgttttcttctgaggtttcttcttaggggttttccatggaataaacttcaaggtagatggtggcatcatcttgacaggaagaccgtgatagaacgcagtcagatagtcctggacatccttcgtactagggggttttatggactcatgatctggacattttggtgtttcccatgttcccacgaagtcaacatctgcatcaatttgaggagatggaacgacatagatcgttttttgcttttcggttaccggattgcggtcttcctcatcaagccattcttgaaagctctgcgggtcttctggatctccggcaagatcatctccaggcagcaacaaaggggcaggaaaggctctgtcgtcttcttcaagtaagagtttgtcttctcgtgggaagctttgatggtctgctttgatcgcagcgaggcgttgccgttggccttgtcgtctgaaacctgctacagcagcatgcggagaggaggacaaacagacacacgtgtgatcacactttgaaattgatctttgtggcatactggaaatttcaactcaagtgtgaagaatggaagaacttggaaggggacggcatgcgattgcgcacgagcccttcccggagtagtcatcaaggactcacatgagtcacatcatcttcatgtggaattatgatagagatggttgttcttgaatcacaggtcaaaggttactcaaccctgtttgcaggccttgaataaagcgctgaactatccggcgatcagtatcccagttctgagagcagttgcttgtgtgtctcatagctcaacttcaaacataagtgcaatgccaattccactacccaggacaatacctatgagtggctggaggccgatatatcttgcgacactgaaaggaatcacccgcagatcatcattcgtggattgaatcattggagtaaagtaccatgtcgaggtgatcccaagccataacatgacccataccattccaacggctctcttccaaagcgggacaatacctgatgattgctttacctcttgccagttctctggtgcttgtacccgtttccaaatattttgcacgccatcctcgagcatcatcccaaagacaaacgataagtagaatggcattgagccggatctttccatcggaacgctctgcagtatatcaaccatgacatggaacattgcggagataagaaagacaatgaaaatgttggtgtatcgctccagcattgaagatcgggtaagatgcaaaacatctcgcgcgatgaagttactgatagaagtgaagggctggcgcatgaattgatgccagaatttcctgtgaaatacgttaacataatcatgccatcctagtaaataaatatggcttacccccaaaagttgcgcaatgtaaatgcatcggccatactcccaaaggctggtggccagtctgcaggggaatctagcccgattccaacgaaaaatatcgacagtactcgatatgcaagatcaccgattagacggtttactataaaccaaatagacagatgcgtggctattcgctctgcccattgtccgaccggcacaatccatttgacctccaaggatgcgggctcatacagaccacgttccctagcctgctgaatcgagaccgtttgcacgatgtctagcactaggcactgccatgcgacgattgctagctgtcgcagcaaaaatcgaccccatgttgggacctgcataccccgccgcagataatactttggatgagagggcacattcttcacctgccagtgtgtattgacggcacgggtttgagtaagtaagcgagatgctgcgagcaacctagacccggactttcgagtgctctttgcgtcgcgcgagatgtctgaattgaccagaggattaagcaacaacaggtttgttgcctgcaaagttgcaatgacaaattgtgttatggcctggcaccatgttggactgccggacgagccaaaaggacggataaaacggctggcgatccatatcatccctggaatgcataggtagcgtaaaagagagcctttccgtgtggtgatgatgagcgcagcaggaaccacattctgaactaggtaggaacagaagaattctaatatgtttgcacctgttgagtgatatagcccgtacatcactgtctggtgtgagaggtgaatgaggtctcggtttaggctcacgattcgagccggacccacaatttatggaccagtcggttagatccgaatggattcctccaggggaagttctaaagggataaggagttggcttaccagatccaaaatttaaagccaacaggagaactttggaagctcagtgctgtattattcatacagcctagacttcacactgcaaaagtgtgctccgatgaataatctgccggcaattctattggttacctagttgtatacctatatcaagaaggcggtaaaggtctatatgcctacctagttaggacccggctgcctacaaacatctggttggtttatcagcgcctgcgcatctgtggaactttctctctacactcatctggacaacatgccttggtgtgcacaggtgtgtcagttctgtcagaagcgatatgccaacaaaaccgcgcttcgaaatcatttaaacaattacactggcacctagcgttttccggctgacggaatccatgacatcttggaaatcaatcaaactctttagcgccttcactcacactacgaggcaggtgacgatcacaaatacaaatgctggacatgttccaagataatcatatctcgctgccggttcattgagcatgttttttattggcgccactgtggatatcaacctggatcttcagaaacgaaaaatggccctcaacatctccattcatggtatcttccctttgatgaagagacggttcttcttcgcgaagagccatttccgttcctcgatcttcccctaggtacgttcacctgtttatcttttaccgctctgtccccttattcattcggcaagtaaccggttgtctcactgcgagcatgcatgttttcaaagaatttttttgactaactcgagcacattgattgactagagttgcgattgataatctacaaatttctcctctctttcgacgaaatatacattgaaaaacgtgtccgcgacagagatgttgacccccacagaagtgggacctggatgcaacataaccccatcaacaatccactggcaattatgtctgtaagtagtcaaatttatgatgaagcacgccggacgttttatagtctaaacacgttcacatttggatcgttctatggtctacctgtattcctgattggaatcggagctgaaaacgccatgctattgcggtcagtgcgctgcaagagcaaaacagatgaatacaaagactatgcggatgacattcgatcatgtctaacaaaggcagccgtggcgggacaaacgccaagccaagaactgcgaatccatcatttcgaagatctgtatttgaatcttgtaacccgaggacaacccccagttgatgtacctacttactggtccaatgattgtcgtctggtgcgacccgatattgcagacgcctgcgccttcccaggtcgaaagcgtttttccctcaacgtcattcttaggaaatatgaagtagacggacgaaatgccgatcgaaggtctacggtttcgtttgaactatatatacagaataagcgagcatgtgcttaggtattcagctgcagcggcgctgtgctttggttcctcctcatcataatgactggaagcatgggatgtgttctgtaattcagacaagcaaaagttactgatagagaatgaatgtagaatgttcatgacgtctttgagccatctttagcacgcatagcatagtattggccctggggatgatttgcgcgttgaagaataactatattgagtcttaattctgggctttacttgactagtcctatttgaatttgagattactgttggcaccactgtgaacatggaggtagtcactagcaatgtctcagaactagtcttgggaggccaaaaataccgtgaaatactgaaaaatacagacaggcgtaaaatattcagccaatgagataacagctcaggtaaggggaccctgaaaagtggaccagcatgtgattggctaatgaaagtacagtactttcagctcttcgctcttattttcctttccaaatgtcaaacatctcgagattcaatgatgcaaacagataggcctcatgtcgtgttggaatacgattgtttagatgatccccagatccccgaggatcagccgcttctcgggtccccattcacccactccgaaacccactctcaacatggattgaccatcataacttgcactgcctcggtattgtttattgccagtgcaataaacaacctcgtcgccctcaatatcacacaacactcatccgagttcggattagaccccggagttgaattatggtgagagacatctcaatgccccggcagttttctatctggttacacagaacatgccaagctcacaaccccacaggccaatgtcaatgcactatcttgctcaaggttgcacattcctgctggcaggatctttagcagacgttctaggcagtaggagaacattcctgtgcggatgctttttacagactgtttgccatatggctagcgggcttgctcgaactggcatgcagtttattactgtcagatttgtgtccggcgtggcttacccgatgtgtttcgtttctgcaatgagcattcacagggagaatcttccagttggtaagatgcgcaatttggcattctcctgtaccagtgcaagtcaatatattggctccggggtaggcatcgtccttagtggaatactctcagagactgttggttggcgatggggctttcattgcgctgcaattttgagcctatttgggtttctcctatcattttgcaggattccccaacaggccgaagagccaaaatacgtcccatgggcagacttggctgaaggtatcgattggtctggaactctgctggctagttcattgatggtacttctattctctgcattggcgtacgtattccctctcagtgatagtctatgcttacagaacgctaattaataactagcgtcatcacaaacaatgtgcaaaacattggcagatcgggcctcttcattcctcttgctcttggttggattcttgtggttgccttcctgttctggcaggattgctgggaaagagacagcacacaacacattcagaattctctttggacaaattgccattttctttccattggtttggttattttcttcgtctacgcgtcttctctctctacttcgcagcttatgatcttcgtattccaacgagtacaagggctctcggttcgacaatcttctttccaatatctggcaattccaatcgccgccgcgctgagcagtctggtcactggacgtttcttgactcgtgttacagccaaccagatactcgtcattgcaatatcactttctagtttctctccactcttgatggctacattgagcacagcttggccttgctggaaatatgcaatgcctgccctatcattaaacccggtggcaccaaattccgttatcccaattgccacaatgctggtcgctgggtcttttccctcagagactcaggagtttgcaatgggggtgctctgtactgtggcaatgatcggagcctccgtaggcatggcactgacggcgcttatctcaaacgatgtcagcacacagcagctccagaaacccgaccagagtacttctttagaatccccagagatatggatgagcggttatcggactgcattcttgttcttgctctctctaaacttggtcggcttggccgtcacttttggctgcttgcgaaaacttggattcttaggtcggaaattggatatagaccattaattcgttcatttcttcttacttatctgaggtccatgttcccattagtactacaggaataagtattctcgttaaggatgcctaatggtacgcaagctacttgtctaaattgtctaaacctaagccatttatgagacaatcgactactaccttccctattgaaccaacatgaaagaacttaggccattagtacccctttttgtcccttaaatcatccttgagtaaccatacatcggctagtattcatagaatgcgacaatgcaatcttataatagtgggaggcatgttcctataaaataaaatccatggccaccaacaaacttttcgatttcgacccgggcaaaaaagaagaacaccatgtcaccaccaaaacagagcatcctcttcctcacaagccccgagcatggacagtccaacgtagcactcgcagtagccgaagagttcctgcaccgcggcgagttcgaagtccacatcgcctccttcgaagaattatcagcacgcgtgcaagcgataaacgacaaagtggagtacgaccaagtcatccacttccatccaatcgcaggtccgtccctgtccgagatcgtgacccgtacaacaccgaatatatgtcatcggccggggcttgctggaacgcgtgatgcgtgtaacatcatcaacatctccgtggtaggctggaagcctgatgagtatatacggtcatatcgaagcagtctcgagattctgaaagatgtccgtccggtcgtcgtggttgtggatccgctgttgcatctaggactagatgccgctcgcagtatcgacacgcgaatcgtgatcctttggcctgtgcctttgaaagatatagtggtaactatccagccgaaagctggtcttttgtggaaatatcccctgtgcgcaactcatatcttcctcttagaattctggtatcgagctgactttctgctcctcagcaccgggtcgggatatccataccctctaccatggagattgatccttgcgaatatatacatggcgttttgcttcgggcttatggttcgcttgggtaagcccctacgcgatcttctggacattcgaaagaaagcaggaattcagactgtctttcctcacgtggcaccttactgtgaaaaccatctacatctctcgccttcattccaagagatggatttcccgctatacgtcccggataatgtcatcagctgcggtccaatcctccggccatgtccgtcacttacagatagcgatccagcacgttgaaagagccgacaattctgatatgtctcgggtcacatgttcaagctccggaaaatgatgcactgcagatgacgatggctacccaggcggttttgcgcgaatttcctagtatgcaggtcttgtggaagctcaaatatgactgggaaagctctccgacggtcaagaatattctcggatctcttgtcagttctgataaggtgaggattttcccatggatccagccggagattatatctcttttggagggaggtaatatacttgcatatgtccaccatggaggagcgaactcatttttcgaggcgtgcaagtaggttatacttggggtcacacatattgaaagaaaagtgctgatgtctcttcccagggctggtgttccgcaggtcattctgccccagtggttcgacacatacgattgtccggcccgagtagagtggctaggtattggcttacacggaagccgcaatgtggcaccgggtatagacggatcgaagctgtcttcggccctgctgcgagtgttgaaagataaaggaatccagaggcgggctatagccattggagatttgtgcaagacggccgaaggacgcgtagttgctcatgatcagatcgtacagtacgcacagaaagagttgtgagcgacgtaggtgcaataaattcattgagtcattcacagttccccttccgagggctcggggcatgtatgcattatgagaatgtcattggtaaagacaagtcatcggcaattcagagagataatagccgaccgaaatccatgcaatcggtcatataaatcatgaaagaaaaaacagcaactgcgatcctcaacgcccgcgcccatatccaacaaaaataatcctagtaactgtgactagatagtcgacagctccgtcagaactcgccggacatcttgccgagcttgcctcagcccctcatcaacagttccattggcatgtcttgccttcacctcatagtgtagctcaaccagctcctttgcacgacgaagatcggccttgtcgtctgccgggctctgatctgccaatgcgctaccggacttggttgaacccgaggctgtgccatttttgtgcacatctaccagtgccagggcctcgttatgaccctgtgccgggttgttagcattgtcattgtctggtggagtactgtcccttgtttaagacgtggcttggacgcgtttgggcagccgtgaagaaggaagcaatatacttacgcagacgcggagagaattgatatctgagaggatctctgcgacttgcattttgatgtgtctagtgatgtttgagccgagagagatatttggtgtccttggaaatcagagccgaagagtgcaatgtcttggcatacccgcacttattcgaagtccgtttttcacctgggaggagattaatatcggcactcggggctcgctggatttatatatattattaatttcgtctgtctcaaagcttggcgctggatttattatcggtaggagaaataccgactctttggactccccaaatgatgacttcttatatacttctagtctctataagttaatctaagtctccttgaactcatacggtccctcgcggtccttaacctcaacctcaatccgtccctcctcgatctccttcccgtcaacctcaatcgacgccttcataacatcacccgccttgacctgtccaacacccttgggcgtaccggtaagaacaatatcacccttctccagagtcatcacgcgcgagatatgcgccaactgctgaggaatgcggtgcagcatcaggctagtcgagtcagcttggcgctcggcgttgttaacgctcagacgcaggaatgcgctgtgcgggttagggatgcgcgatttggggatctcctgcgagatagggcagaaggtatcgaagcccttggcaatggaccagggaaggcccttcttctttgcctcatcttggacgttgcgggctgtcatgtcaatagcgaggacgtagcctgtttagcgcaatggtttgattagcgacttgctgcttgagccggtccaccggtccaccgctggggtggacactgcggtatgcccgttcggacccggattgaatgctgtactcactctgaatcgcatccaatgcgccctgctcatcgttgggatcgagatcgcgcacggtcttaccgatcacaagaccgagttcgacctcatagtgtaggctgacgcccttggggcggagaacgggacccgcgccgggaacgaggatggatgatgcgggcttcaggaagaagaatggctgcttgggtgcggtgttattgagctcggcaatgtgatcgctatcaatccatgctgttagcaattgtggccgagagaagagaaagcgacgccggtgtcggaactcccgagggaacagggcgcgcggagacagggaaactcacgcatagttacggccgatgcacataaccttgcggcagttggcgcggacggaagccattttggagggaattggggttatgcgattgacgaagaagaggatttaaggaaagatatgtcgtgggagggccggaggttcgggtgttctccgaaagatgcggagaactcccacggcgccgaccgcttgtatctttatccactctctagagaaacgctgaacgaggaaaaaagattggaagatacgcatctacatatctgacactagagaactcaatgatagtcttttacggcactattcattcaattgcagctggttatccgagaattgacatatcacacaaccacgaggtcggctccctcgtccgagaatcggaatatgatccgagcatcttaatatccgtaggaagacaaatatattgatagagcaagagtcagtcaagacactggaactgctcgaaaaacctaggaataaacgtatcacacgataatagaggcctaccggctgttgaatgggctcgaattacgcttgtatgccactggcaagagtagaataatacaagctgtttatacactagttattgatacagtaagaagttaaggcttacaccaggatatctattcaataagagaatacgaagttaaatatcattcaaggacaacgccttgaggaacatgtcacattttggcccgttctattgatcaagtacgagaagaggaagcatccttaaccaacgagagcgagctagatacagacaaggaaaagcagagggaaatgcataagaaataagggaaaacggagaagcaagaggtgaacgcaaacgtgtctcatctccgttagtgcaagacataggaaccatagcaaaggccgagaaaaatgccggggcgtcgacttgtcaactcaatatgcggaagcatagccccagtcacttgcccggcacactgcaggcggaaacgcagaaagccacttttaacgcagattctgcgatcataaaccgcatcaagacgtcaagagttagggggtttagatgaggtcagccacgttcatgggcatctcctcaacctgggtggagtagaactgctcgatctcacggagcatgcggacatcgtcagcggtgacgaagttaatggcaacacccttacgaccgaaacgaccaccacgaccgatacggtgaatgtagttctcacggttggcggggagatcgtagttgatgaccagggaaacctgctggacatcgataccacgggccaacagatcggtggcgatcaggacacgggaggaaccggaacggaactccttcatgataacatcacgctggccctgctccatgtcaccgtgcatagcggagacggtgaaatcgcgggcagtgagtttgtcggtgagccagtcgacctttcggcgggtgttgcagaagatgacagcttgggtaatagtgacggtctcgtagagatcggagagggtgtcgagcttccactcctccttctcaacagcgatgtagaactgcttaataccctcaagggtaagttcctgcttcttgacaaggatacggacggggtcacgcatgaacttggtggtgacctcaaggacatcctggggcatggtagcggagagcagggtgacctgggtagactgaggaagcagctggaagatgtcgtaaatctgctcggtgaaaccacgctgaaaaaaagagttagaaccgattgatacatagagtatcaacaatagcaacttaccgacagcatctcatcggcctcgtcgaggatgaagagcttcatggcggtggtggacaggacacggcgctggatcatgtcgtggacacggccgggagtaccgacaacgacctggggaccggcgcggagagcgttcatatcctcacggacgttggtaccaccgatacaggcgtggcagtcaagggacatgaagtcaccgatggcgacaacgaccttctggatctgctgagccaactcacgggtgggagcgaggatcagagcctggcaggccttgatctcggggtcgatcttctgcaaagcggaaatggagaaggtagcggtcttaccggtaccggactgagcctgggcgataacatcgttgcctgacctcacaggttaggcgcaaatttcaaaaatgaatctggaataaaagaaactcacccttgatgatgggcatgatagcacgctgctggatggcggaagggcgctcgaaaccgtaggcgtagacacctgatatcccgtcagtatttttttttcaccccacctgataagacgaaaagggacttaccgcgaagcagctcgggcttcaggtccatagcatcgaaggaatcagtgacctcatcgtagttagactcgatctgccctattgatgaaaattgcaagattagcctccatcttcatcacgcatttcagtatccgacgccacccaatactgaatgcgatcgcgcgtgcgacagcgacagcaagcagcggggtctctaatcagaaagtaacagagacttagcacataccctcggcaagatcctcaagacccttgtcagccatgattgcggtttgatagaaaggatcacaggcgttgactgtgatcggtgtggtggggtagttttagcgaacttgtgtagattcgcgtgggaaagttgacttctagtacctcagactcttgataaagagtctttttacaggatactagggaatattgaaaaatgtggttggatgtgaaaattcacaaatggggtgggaggaggaagagaagaaaagcgaaaaaatcgaatggccacaaccgccgcgccatttgctacgccgtttttttttttacggggcaaaatctcaccgcttgccgtgttgggggtggccaagcccaagcgagtttagagtgggcgacatgggcatgaaaacatcttcttagtgatgatattgcattttttgaactgattggtgtggtgcaggttgttgctttgtttagggactttgattctgtccattcagtttcttatgttcccatttatttggtgaactatcttccagttgccatcaaacgcgtctttgaagccctaaagtgccagccagatcatgcctgatatcacctccttgtcgagtcatccaccaccacacgatgcagagatcataacggaggctatcccctcccacccattaggcgtgaagccaagtggaaatgctctgttggctacatggagtcttcgcaatgccatagggacctttcagcacctaccagacgaactaatcctgttgttgttggagactctcgatgggccaagcctattgagcatcgggcggacatgcaaggctttctatgcatttacccgggctgaagaactatggaaagcgctgtttgttcggtaagctacctgcatatccagttgaaccatgtagatcttagagccctacatttattcaatatcataatgtcccaaacttccaatgaacacatgagatactaagtctgcttgcagtgacccaagagaagatttcacctggcgagggacatggcgatcaacatatctcaatatccccgcctccaaggtgcccatggtggactgctcccagttattctccgactctctataccgaccgttcaactgcgcacatatctcactcgacccatatgtctccaagattccggcgcggaaccagatcgcacgacttccagacctgtcacctgaggaattccaagcaaagtggaccgaccgaccattcatcttgactgagcctgtcaaggcctggccagcatacaagaactggaccgtcgggtcattactcgcccgatatgggaagaccaagttccgcgccgaagccgtggactgggccatgcgtacttacggcgactacatggcagataactccgacgagagcccgctgtacctatttgatcggtccttcgtctctaagatgggactgtcggtcgggtctccagaaaccacacccgacgcatcgtactggccaccagcgtgcttcgctgaagacttcttctccgtgctcggtgacgaccgccctgatcatcaatggttgattatcggccccgagcggtccggcagcaagtttcataaagaccccaatgccaccagcgcttggaacgccgtgatacgcggtcccaagtattggattatgttcccgtccagcacgaaacagcctccgcctccgggtgtctttgtgtcggatgaccagagcgaggtgacttctccgctgagcattgccgaatggctactgggattccatgccgaggcacgccggactcagggctgcgtggaaggtatctgcggcgcgggtgagatcctacacgttccgtctggatggtggcatttggtcgtgaacctagagccatcgatcgctattacgcagaactttgttccccgaggccatctcggcgctgctttagatttcttgtctaacaagccggaccaggtgtctggattccggaagaatgtggttaatccgtgtgagcggtttatggccggtatgcgcgaggcatatcccgacctgctggagcacacttgggatgagttgcagaagaagaacgaaggcaagaagcgcaaatgggaggatattgttcacggaaaaacagaagacacccaagacaccgaaggaggtggatttagttttggatttggcgatgatgggagtgatgttgaagtcccatgaactattactgcaatatggagagtgattgaaccgcaacccaatgaagtcgccaccacaaaccagcaccattctccgccggaaagggcttccaaacccatcaattccaatccaaaaccagttcaaaatttgccatatggtcattgttctctacactgcctctgagtctgcatattcgtcaatgccccgggcatcctttaatgacacgcgattgtctttgccgctggcgttccttcggagaaagtcaagtacccaacgaatgcgcccactgcaaccgcaatcataaccggcccattatacgtcatgaagagcaacctaaaccaaatcagcaagccaggacggggccaaatggtttccgggaggcactcacatgatgaagaagctatagaacacttggatggcatacaaagccgccatgataagcttgcccttgcgcgccaatgccgctctgttctcgcttcctacaagcagtggtgagctttcgtggtgagtgtggttggttgcatccgccaggccgttggcaatgatagggtcggcgatctcagcgtctgcagagagccaagacatcaataagaagcgtgctcattcagagtataccatctccctatcatgtccccgatatccaacgaaaacatagtaggaattattgggaatagagtatccttgacactgtccatggaaagagcaaatcacttacccccagtagtggcagaagttcccaggaacgcacttagccgctgtgcatgggcagcctcgtatttacgagttgctgatcgtattccctcgtagcccgcagcaaggataacgatagcgatgagggacaagaggaaggagaagggaccggtgatacgccagctgcggaagacaatgcacaaattctcggaggaccagttaaatagcatctacatacggaattagcataaggtaaactacgaccaaagctgaatcgaggctataactcacattcatactgcatttcccgcccatgtccatatcgccgtggcccatatcgccatgacccatatcaccatggcccatgtccgagtggtccatcttcaatagtagtgagtagatatgcaatagtaacaagagacctcttatgtctcaaataagataaacgacaatatactcgtacgatggcaggtggtacgaggagcgaacaaagcacatcatcggacgattaagaggaggggaatgcaaacaagacaaacatcgataagctctccaagcggatataactctccagaacccaaacgcggtcattgactacgcactgacactacatccaccccaatctcaactttgtttcacccattctgcgcatgggatacgtcactttagcataaaatattcttcccattgcgatccacttccacaataatggccgacacagcaccggctccaacagccgcgaccgcgaccaccggagttgcagcgcccacagccggcgcaacagcaggagcaccgaatgcgcccgcagatcagaatgccgcgagtcgcgggctaccttactacgagaaactgcgccgcgagctgcgggacacgctgcagaaaaagcgcttaatggataagagcatggtgagttgcagccttgcgcgttcccgtctccagggaccgggacgtggttacctctctggaattttgttatttcgctgcgcgagcatgttttccaattgagaatctgcaatatcgccctataaatgtgtaaaccgttctgctctgatgtgtttctaacacacctttcccccaggcccaactcgaagaccaaatcttccgcttcgaacagtcatacctggaagaaacgaccgctggaaacatcatcaagggctttgacaactatatcaaaggctctgcgaatgggtcgagtctcggcgccgcgggactgggtctgggcagcagtatgggcgggtcgaggcgaaaggcgcaggtgacggaatcggatcgagttttctcgcgcagctcggcgagttacatgatggtatgctgaaccgacccgaaatggaactaccatatggtgtttctgatttgaactgaggactaacgattattgttgtgtctgcaggattccccaggtccctcctctgtacaaaccacgccttcccacgcagcaacgccgacatctacgactggaaacggcatgtccatgaagattgacccgctaaccgtttctgccgggatgaggaactcgaacggcgcatcaaaaaacaaaaagaaggcgactggtgggtcgaagaatacgaagggcaagaaccagaccgaggatatttccgacgaggacaagccttctgtgaagcggttgaagatcagctacggcagagactgagttttcttgcgagattcagtcttctttatgttctgcgcccgtcttgcatctatctgcttggctttttcttgagttcggagttggttggtttgtcttttcacatgactcctgggaggagtcgtgtttcgggcgtagcgggaaatgggaatgggatttatccgtcttattacacctacgatgcgatatcatgtaaatcacgaagttatacagactacagcgtttgtcggatacatcatttgtttcattgcttcaaattgaatgcgacacgagctaggtacatgcgatgagtgccttgcgatactctttgggcttggctaaagcctgccaatcaaatacgtttcttacaatcacagctgcagtcggtatgtagcgacctcaaacgccctcaactcaatcttgatcgcggaaagaccgcctgcagattcaatatcaagcccgtggttctcatcatcctcgagaatattgcacttgaaaacattcttcacgggcagtgaggtctcaatggtaccgcgagccttaccaccaagcgattcatagacacgcagaataacactctttccaggacgggtaggaacaccatcccaggaaacgtcaacatcatcctcgccgcgcttgacaacatctagaatcaaggatggcgcgcccttgatagatagagatttaaacaaagcattggaagcagatgctttagggccggctttctcaacaatgagtgggttattgaaattgaagcctgcgcggattgttcgggcatcaagggcaccggcgtggggaagaattgcgtagcgaatgtggtggcgacccatgtcggcgtgggcatctggcgccttgggggcacggagaagcgataagcgcatcaggttaccgcatgttgcgaagccgtatttagagtcgtttaggatggagactccgtagccgttttcggagaggtcggcccatttgtgacagcagacttcgaatttggccatatcccaactgcatattacttagtatcgttgtgaaggagatgggaagtcggtgcataccttgtgttataatgcgtcgggcgcctaacgatgccatactgggtctcgtaggatgcttcggtgttgacgatatcaactgggaactcaaccttcaggaacttcatcgtctcttgccattccacctcgctctccatttccacgtatgagggctcatcggatgtggatgccgacaggctgatcgtggtcttgatccagctcttctcgctgatctgtgtctcagtcatgacactcactcggtgtgggtcattttctacaatggtcgtcttacccccgggcaactcctttcgtgactcaatatggaacacctcgacatcccatgcttgccagtaaagaggcttgtcgtcgaagataacaagttggccagccttgcggtcctttgcgacgatttctctatcggcttgcacatcgtacaaggatgtgataaccccgtcatggacatcaaccctaagtttaccgttctccaggcggaagacaccagatttgatctcagtaacggtcaccgaagtggttgttttgaagtcagcccgctgaacttgcatcaccccagttgtaccagcagccacagcatatctggatccattatatgcggacactgctggaggaattgcgaccacttctgatcgggcccatggcaaggtattgagggccatgaaatttccacccgtgacatcgctagtgagtcccaaagccttgagggcattctttcgcagcttagctccaatctcaaagatttcggcatacaacttgtctgagtcatcatagcacatttcgatggagctacccggcaagcaatcatggaattggcaaaggagggttccttcccacatctcatcaatctcctttttgggataccgatatccatcattagaagccttgatggtagcgaatgtcgcgagaagctcaatctcacgcagcaaaaactcggccttgcggttattgcgcttattgttcgcttgagtggtgtatgttccacggtgcaactcaaagtaaagctcgccgtaccaggtagcaaaatcagtgccagaggcagcctttgtctccaactttgcaaagaaatcatctaccgactcgcccattttcactcggggcaatgagccgacctgatcactgagaccgcggcatcgacgcagcttttcgaggtgcccaaaagtcggaccaccacctccgtcgccttttccgaatacaagcagcgatgacttgtccgtgtctagagacttatgctgagtgacactgcgtttgacatcaccgaaatgcgcttcagctgtgtaggtctcagcaggagccatgtggcacaagacttgactgccatcaagcgcaacccactggaatgtagtgtgggggaagttattgatgttgttccagctgagcttctgggtgaagaaacggctcatcccagccaggcggcatatctgagggatctgtgtagagtacccgaacgtatctggcaaccagaaagttgtgcatcgcttaccgaagtttgcctcgaagaatcgctgtccatacaagaactgtctgaccagcgactctccacttggcatatttgtatcgtgctcgacccagctcccaccgatgggctggaagttgcccttccttacccagcgcttcacacgatcaaaaacggatgggtagtactgcttgagccatttgaattgttgagcctgagaacaagcaaaacggtgctcaggatatcgttccatcagatcacattggttagaccatgaccgtgctacctttcgcttggtctcagcccaaggccacagccagcaagtatcaatatgacaatggccaatggcataaactatcggctgcgtgtctgtgtcgtaaacatcggatgagtctactttgtcgccaaggtactttctagcaatcttccgcccctcgttgatagaatcattgcttccgttgcccgcaatgaaagtatcgatgatagaattggccacaacattggcttcatgcgactcccatgaatcccctgggaattcccgggcggcgtcaccaataatccagaaatcatagaaaagcgcccgggcagccaggtttaccgcggtgattcgcgcagtgctgagcgtgaactgcttatcgggatttggtggctggatcgaatcgccaccaggagcattgccgaacatgccattgcaagccatttcaatgtagaaggtatgctctttcccatcgcaccattgtttggggagaacaaactcggtccgttctccgcctccagtcaagccctgcagcgggtgtccgtcctctgtccagatcaggccttcgttgttggcatcccagtggaactctagatgctcccgttggagcatgtcctcgggcactgtgaggtgaatccggaaccaatgtgtggaccaactggggccaaaggaggcgcctatgcgagtgggcttgaattcctgagaggtcgcctctttgaaggtcggtcgctgcaggtccggaaccgagtaaacagagagcttgacatgatcttcgtccgagtttgtggcttcgtggtactttgagacgaggttttggccttcgtactggccgttcgacgtgaactgattcaatctatcggtatagatcttcttgatacgttggccgaccggacgttcagctaactggggtaaagctggaggagcggggcgagagggaacttccccacccatgatgacggattttgattgttataaagaagaaaaagaagtacgtatgctgtaatatgattgaacgaagacctaagttgtttataacagagagggtgagaggtgaaggaaggagattccctcgagttcccaaatgcggagacatgacggcatgcggagacggcgatccacggatgttacggtataccctcaacttttgtacctggatatagtcatggatatattaaagagtatttgatcattattcagatcatttcaacatctattacccaatatacttagcgtacttcgtaaactccccatctacctttaaccgttcccaatcttcgtctctcagacagataccaacaggcatctcaccaccggccgatcgaggcatcaagtatcccaagccctcaaagggggtaaaatgtggtcttcgcacagcttcaggcttacccaatcctagattgaagtcgagatcgtaacagctaattctcgaccacgaactaagcataacatccgaggaaacattgaccgtggaagtaagagaggccttggtcttgtcaaccgagcgactgagaactgtagcgagggcacgggtattgaaaataagatcatttttcttagaatcgagctgggaacgaagctcggcggcaacgatgcctagaggcttttcgaggagtttttggacagtatcggtgttgtatgttaaattctgcaggagacctggatagtcctggggaataccaaagcgctgtctcatgtcgacagcacgcgtaagcatcgattcagaagtcgcttccagacgagaagcccgggcgcgggcaatggatttccagataaaagcgttaacagcatcgtcagtagagataaagtccgtggaggcgggcaatgtattggtagcgagagccttgagggagccaagctgggccgcagagaattcaatataggcccatgtagattttggaggtgtaataggattcgagacgacagtttcgacgcttggcgggggtttcacaatctggcgagcaagctcagggcccggggtgtacgaatcatccagtaatggaatgacatgactccgatccatgttaccgactgcaagctcctcgcttgtgaacggctcatggtggcaagccttggacagcaatccgatgatagagtcttggccagtcatgtccatgacattatgctgagcgaccagcgtgagcatcaaaccgccctcgattaaattcgcctggacacagaagaccaatgctgactccgtcgtgatatttggcaaattgcccggtaggtccaaagttgtacaaggagcgatgactttctcgtcgagcatggtaaaagggaacttggcctggcgaagcccgtccattgtcggcgcggaggggtcatgtcttagatctttcaccacgagctggattttgtcgagaggagttattttgaagacgcccgtattaccatcccctgcgccctcgttgacaacctggccagtaagccatgggaaactttttgccaatcggtcaagtccgtttgtgagagtatcgatgatggcatcatgagaagatgcctcggggacggggtaaatgaaacatatttgtgtgtacaatttgtagaggcttggagtttggcctaatatatcgagaacgttgtccgtcattgttactagttttgtgcaacgtctcttgtttttactcttctgttcctgtcgaggggagatataaacattgccccgccaagtccccatcctttgtgagtcaacattactcactacgaatcattcagaattaatgtatttgatcagttcctaggataatatgtttaaagacatacttatgtattctctattgatctatctcaccacagaactcgcatcggggccacatataggcagacgctcgaggcatatattttccaacgccgtctccatccaatgtgcgacgagtttgaactggtcaaggtgtatttgagctcaagaagtgttcagaattatacatgccgaattctctaggacatatttctgaacccgtcaatgtcggccggttcgctgttcctgagagttcgttgatagatgatgcgtctttcgtgcccgatgccaacgttgagatacaggctgcctttgctatgagactgtgaaggttccttttataatctccagcggcaattagatgggatataatatattcagaagagatttatatatcgatatatctactgtataggttgacaccagaatgctcaaaataaatatggcaacataatctaattaagtatatattcatgcaccctcaaaataagtagacatatctacgacagtaagtcaccgattacctttagattccaccatgtgaacacacgcgcagattatcgcttccacggttatgggaagatgaagccctagaagaaccaggatcttcgtaaaaagcctcatagttgatcggttgcacaaaagggatttcgcacattttcttttgactgtccccatgctcgaaatcgaacaattctcttggaatttgggagtgggacgccgaccctgatcccgatcgctgcccaatggcattgtcagacttggaagctgatcgatctcccgagttggtgtgacccgagatggattgttcaaagaaatccgagactacaccggccatcatgcctgtctgaagctcggcgagaacccgtttgagggttgggaggcatgtgcagagaatggaagagctgaggattaattgtagccagatggctggcatgagggcattccatgtttcatctagatggttggagttatatagtggtcggagggagtgtaggccggcaatggtcagggctagaactctatgtgggattagatgaggattttattgatgtttggaggttcacttacaggatccgcagcgcaaaaagggcagagatttggtggcgcttccaccgtattatctgcacttgatgtagtaaaaccactggtagtacaattattaccacgtctaataacatgtgggtgcctcctagcgcgatatataaaacttcttgattcacgcatcgctcggggctggagttccacggttgtagttgcttgcactgtcttccgagcgctatgagtgctgccagagcccaggtactgatcagacctaaagcaaccctacttgcaagcgttattttctcaaagggttgcaaggataggatgaggagcgcaacagctgccttggaacatcctaagacgacaatagcgagaagttgactagcgaagaatgtcttgattatgttagagcatagcctgttagaggtttcttagccttcttaccttgctatatttttcaaacgaggcattgctcaatacatatcgatgcttgccaatgccatgcgagctggctacattcacacacacagtctgagggataaatatgatctgatgaattaattagactagacaatgattaaacgcaaagctacttacacaactgagaaatagagttgaatcgctccaggaaactctgcgcaaaacacgaatgcgagatatcaccgtcactgttgtcgcgaggatagtgataataagtaggatagtgctcacggtgataacccaagcactatgatcgttatcggtgacaggcaagagtggcagtaggagaacatttatgttggatgacatggcagtcgaaagattctgtagacataaatgaacagaatcatgttcatggcatagcagaagagacattatatgatatagaacccagccactgaccgagtaccctcatattgggttgttcattggacctcctataacaccaaagacacacaagcacgataattcaagtcttgcaactgatcagtctatctcaagttccacaaccgtgcatcttccagtcccacctccaacgccgatacccctaggcaagacaagaacaatttaccgtaagacaacgattctgtatgatccttgttcttggattcatgacctccgtgccagttttgctttttctttccccagtcttccttgggaactgtctaatgtttttgtttttcgccatcaactgccttatttactctgccgagaataaatggagcgccttgagatgctctccttggaaaggggaaatatagtcattggaaaagccgcgccagatcaagatgcaaatgtctccaatgcctatgacaccccgcgtaaaaagactggacccccggagcaggcttcgcctaaggtacgatacgatttgttaagtcaataaagtctgccagctgagacagtatacagcgtctttttaatttcacccagatattcttcttctcacttacttacttgtcgagctgggaaactcaggctttgtacggaagtcttatcccttgttgtgcttcagtactaataacaccgccacgacttaggaatctgagcacagtgctctcaaatggcggacctgaagccctagcttggggtatagtaattgtggtattcggcgcaatggctcaatcagcctcgctagccgagatggcatcgatgcaaccaattgccggggctcagtatcactggacacattacttggcaccgacaagccagaagaagttcatcacttggatgcagggtgtgtcacttatcgagtactgcctgactcaatgctaacttcatataggttgggtgacgtggtttgcgtggatctccacactcgccggtgttgccaacaccactgctacgatgatccagggcctagcaagtgtgaactaccccgagtacgaaccaaagcaatggcacataaccctcatcattattggcatgcttattgtcgaagcgttgatgaacatgtatacattttggctgattccgtggatcgagatgctggccggtattctgcacatttgccttttgatcgtgtttctggttgtattcacggctctagcacctcgtcacacgccggagtttgtctttctacacacgcaaagcgcctcgggctgggcgactttccccgcatggaatataggtctgcttactcctgtctgggggtttgttggtgcgtacacactgaatacttggagcaggtaaagactgaaagctaaccatcgcaggatttgacggcgcagtacatatgagtgaagaagtccgtcgagcaaaacaagccgttcctaggtctatcttctataccgtcgttgccaacggtatcctggcatatgcaatggttgtctgcatgctcttcacgatgggctctgtggaggaagcccagaaatcaagctttccgataatcgagatctgccggcaagcaacggggtcggtgaaagcagccactgcgatggtcagcgggctactcgtaatctcgctgtcggtaaatctggcgagtatcgcgtctgtctcgcgattgacgtgggcgtgggctcgtgatggggccctgccgcagtggtttagctatgtatgtatctcgcaccagacggtgccacggaagacgacgcagaatatataagctgacaagaacggcagatcgaccgcaagcacaacgtgccaattcgcgctgtttggctcccagtaatcgtcgtcatgatcctcgcgtgtttgaacatcgctgacggtgccgcttttggggcgttcgttgcactggggtcgattggcctcttcgtgtcatattttattgctattagtttcatggtgcataatcggtttcagaagcatgtggcaccgcttgggaactggaatatgggcatctggggacttccagttaatgtctttgctttggcgtatactgcctgggttacagtgtggctagcatttccgtcagcgttgccggttactggtgagaacatgaattatgcggcacccatttttggtatcactaccttgttcgcttttgtatattggtttatcaagggtcggactcgctgggagggattgaataaggaggttattcgactggctgtggaggggggagaacttcagttgaaatgattattctttgtcacttgctactggctttctactagatgtgtcagggtatatagtatagcagaacagctaaagattctattcatctaaaataatccaagcaattacttattcacaccaaaaaccaaatccatatcgatctccacaaatccttgatgaatctcattcaaacgcgtctcagcaactactctagcagttgcaagtacaacagtactaggggcatcatatggtccatagactggcatcgagatgcaccgcggagtgaggcgatggagaggcctaaggctgacctccgcgtgcccattcttgattcgacagatcatacttttcatcagcctttcgctggaatacttcctatatctctcgtcgaaatgcactgtcacgaagtagacgcattcatagtcgctcatctcatactcggggagacccggtcctccaaatttatacctaaacatacctggttgcatcatattgagggttttcggaatctgctggctgttgggttagttattaaattgctgaataaaatggctgattatgaacaggtacaggggcttatacttgtttatatagaagaatggagacagccatgatatcatattctttcatttcggacctctagtaagagacattgacctttcattcaaacactaaatagctttgttgaattatccgatacattccagatttactatgcattgttgctctttgtcttgctttgtatctaattaatccctaggattaagccacatgtgccaatctgataaggaatctcaattggcagatggggagttttgaaatactagcatcattagttagttactaggtttatctatccatttataattaagccagccaatgaggcattttgtaatctacgcatactctacaaaggtcaagaaaagtggaaagtccaaaattgttaattgaagtcgctggcgtcatccgtcgtaaatagaccgtgggcaggtgccagcatcacccacggtcatgttttgcagagcaagctcatgctaaggcaccgccttaaagagtgaaaaaaatgacaaaagtagatcacaaagtagatccaaaagctcatgggaatccgtgggaatcagtaaaggagaagtatatatccaaaagtatatcagaggctggaacttaagccttaacacaatactgatatccgagccacagatcagaacagttctcgtcgaggccagtgttaatgctgcggagttcctcgaaggagattccgtatgcatcggtcaattttgcgcagaagtcaccttccgtgatggtgtagtacttctggcatgacgaggtggcgtatgggtagataggggctgttgaggatgatgagctagtggctgctgctgaagatgtcgcggctggcgcggacttggttgtccaggatggggtggcggtggcggtctgcgtggcgacacgcacgttcactgtggaggcccaggtggcggcagattccacggaggtggtcgcggaggatgcggcggacgatgtctcggttggctgggcggcttcgacagaagtggatgtttgaataggctcggcagtcgaggtggtctgctcagcaacggtggaggaagaagtttgggtagtctccgcagcctctgtggtggaggagctgctcgagtcgtcgtcaccactgaggagcgactctgcgccgctagtgatggatgcaatggtagattcaacacactcgctcacatcgccggcccaacctcggacacggttggcgatatcagaggcgtagcagtgggttgcgccgcccgcgccgaggttgccggatgagtcgatggagccagagttgtaggtgcgcgcggccttgtagtacttggtcgcagtggcgccggactgagcctcaaagcactgcttgagaccatcgcccgaggcggttccagcggtgccgtcggtgatcatttgcttgatggtggaggcggggcagggagttgtcaagctgccgtccgtattgcaggtgccctcgcctgcgtggctttgcatgagaccggtgttcagaacgccgttgtcggtggactgcacgcgaacgcagcccttgctttcttgcataacaattgcaaggatgaatcgagcgtcgacgccagtctcgctggcgagtgacttaatgctagtgtttatgtcgcttgtttcgtcgtcagagttgtcgcatgatgcggcaatgagaatttggttgagagaccagctagaaaaacggttagctcgccattctgcttatatatttcaggttgatctactcacagagtgtcgtactccgaccattggctcagggaaggccatccgtcggagacatcgccgttaccacccatgacagcataggtagcagcggcgcgacggtgcaagttgtgatggggcttcgcgccatggggaatggcctgaatgagagtggaaaggctgccagcagccaggatctattgcgaaattagtcatggtcgcatggttggaggtggagctgtggaccatgccgcactcgaccactggttcgaagtatagacataccaatgaaggaaagaacattttgatagagggaatgagggaatgagggggagacgacgaaattgaagcgacaaagaaacagtaatgaactgtggaagaagccctgcttgcacgatcgaaagaaagaaaagaggaggggaatgaacttatatgtactcacgagatagatctgtgccctttaccctgccattctcattcggtagagtgatcagttgaggtccacagcggactcgaattacgttcgaatgtggctgtaaaagtggtccaatagcgggcgttggaccttgcgcagtcgagcaccgtacacctgtaagggctgaaacaccgtccgaaaagggacccggccgcctggttatggggcgattggtctgtttcagacagcattaagcccctgtgggcgaacttagttagccttccgaggtgatgacggcgttcattggcgttcatcaccccgttcgtgggctggtgattgggctgggatcatccatgtgggactccgatggcgaagtttgtcctttggactccttttctggccctttctgaatggctgattagtgacgagagacgttggacatttgaattctggttggttgtgtgctgtgttcctgagtttttcccctggtacctgaacggttcacccgtgtccgcgggagcttccaggggttcattgcatgtgacgagtatgcatcaagcactttatgacctgatcacatttggactggaaaatgataaggatgtgggacctgtctattcaacatcagacaaagaggcgaggtaatgtcgggttgcatcgaaatgctcaaataaccgacgaggcgctggtggctgattgtggcctgctttctcaggcattctcactcaaaaacggatttttctttctttcacataaatttcttacggggaaatcatggaggggtactccgtcgatgatctcaattgatcctattcaatccctattagggccactttattatgcattatatttctaccctagctatggtgtacaacatttcggccctattggcttcatctttttacgcttgcaatagccacgtcctgcaatttgaacacaaaaaacacagtcacaacgtacgagagatattgtcaaggctatcatccatattgcaatatagtgcagtggggtgctctcggtaaaacaaagttcttaactgttaacgcgtacttctccgcctgtctaacccacaatagaaggtcaaagaagatcatcgttattcatttctatctctttcaattttacctcgagttgatagtgtacatccaagtcatggatctatcaaacagtgatctcggtcggatcgacacatatcttcggacttccgaggctggttcatgcaattccatgcatctgatgtacaggaagcatgacagtgatagacagagcacctacggagtactccgtactccgcaaattgcaatcacctacctaaccagccatctcgcacatgaggccagccaccaaccagcagtgatctgcgatcccttggtagcaatttcgaattgcaattacaatcgttctttttgaaatcgcctcgtattagactaacatgtcaaggatccgaatgtatggatgccttaaaaggcgctaaatcatgccagatcccccaaggccccgcaatacaaagccttcaatattgattgtgagtaatccatacttcacaccggtaactaatttatattcaaaaaatcaatatttagtcgaaatatattaacaaccgacataaacgaccacctgatcttcaaaatgaatgctgccccgctctgtcttggtttagttgtacagcatagatgccgctaagacatggcgaatccagctgacattccgacgctattggacaataattggaatatttcgatgtcaaggactagttcacccacgtggccactcgttgtacaagaagctaattctcactgctgttttatggaatgcgttttattgcgtcaatattatgtcaaaatagatatacgacaatactagttctacctagcatgttgtagtagcttccacagaggactgtggctgaggctgactgggtaaagctcgagccttatgagcatcagcccattgacactaataatactccgttgtgagtaagtcattgtgaagagagcacggagactctgtactatatatatcatagctttaaccttgttatgaggatatcagattttattgctattcttgaagtcttacgcggtgttcgagtggctcaaagtatgagacatcggattagtacaaggtgatcgaggtgaaccaccaagagttgtcgaataacatgtgcaatcatactgtaagtaattaatctctcggagaattctacagcttttgatagacagaatatccataatttggcccgcaaatcccgtcatctatagtacagagcacgcgcagccaaaatcaatataagcactcatatctcaaggggtatcttgtgattcgtacggagttcataatagtccctcatacaaattcatgatcgtcactcatcatattagctagacttcacagccatcttttttaactcaatgatcagcccgaacagcctcctattaaccagcccctgatagtcccagcccctttcccctgtctacgatctgcgatgcacggaatacaatacagagcgaaggctgacatcatacatacagagattgtacttcgtatgaggaagtacagagtacaccgtacatatatagcgattggaatccccttcgtatagtgacggattaggatttacttcagaaaggtctgttgcatcacgcagtggaatgtctagtcaatattaagtcagtcccgtacagtgatctggccaagtcattgacacctagtatacctagcacttgaagagttgtggtgaattttacgttgagtgaatagatgatatccatgggtagcaaaataaggatccaaggctcacgtgtgacgtatccaccgtggaccgcacctagaaggtttgccgatatcgcggcaaaccttcccgcaataccactgattttgaatactcgatagtagtaactcgaagattccatgttaattcaatctctacaacctgttatcgaaaacaaattgattgagagccgcggtatgttgaagaatctcagcctccgcacggcatcggagggatatttgatccgggaagttggcatcgggaccgttatttcacttcaaccctcctatggtcgcaaaactcattttttgcatcaaaatttcccgacattgagactttgttatcaactaaataaatggcaatcttggctgaaatcatgtaccagcctacgaagagataaatacaaatcttatcacagattggccttggtgagctccaactcagtccaatcccataagcgcttccccatatcctcattgcacgcccaaatgtttcgacgtttcaaaattccaacaggcacataatatcctccattagtgagctcctccttcttcgcaccaacagcagcccacagcgagttacacgcgccctgttgcactgtggaaccaaacaaacgcaaaaacttggtacccaaagcagcaaatatagaagacgaattcagagcgtcatacaaattcgttatgataatacctggatgaaccgacaccgacgttatcgacggataccgcctgctgagttccgcagcgaagagaatattggcagccttcgacgctccgtaccgggaacttgtgttgaccttcttgagcttctcttggtccaggattttctcaaatgccggcgcgaaattatgccccacggaagtgagcgacacgacgcggacgtccgagccaggctcctcggccgttttgagcagtgtcggcagcagcaagttggtgagatagaagtgcccggtatggttagtgccaagctggatttcatggcccatttccgtctcaccgggaggcagagccatcacgccagcattgaggattaggacgtcgagacgggtcgactgggcgttgacttgttccgctgcgttcttgatcgatttacttgacatcaagtccaacggtatccagctaatctcgacatcatttggaacggatgatttaaccgacttgatggcttcttctgccttgactttcgaacgcgcgccgaggaagatcttcttcggattgtgcttggccagctggaggactgtttctttgcccaaacctgcatttcctgtgaacgtgcatcgtgttagatgcggtattaatgtgccgttgatatacggtttaacccaccgcctgtgaccaagatgaccttcccggtcagatctgggatatcgctttcgggtgtgaagcttactgcacccacatagttgagtgcgtccatagcagctatcacccatccagacattttgatgaggggtaggaatactgggattaaggttgtgttcgcgttgaattggttgatagccgatgctatatatatacatataagccggagtaactatcccccgagctgacctgaaagttgacacaaaggctaagcccccaaacttcaaatggtccctgaaagtctgtcattctgaaatggccattgacttgagggttcaaggaagccacctgcaatactactagccgagaaatgcgtggtaggtctacggatagcatttgccttactcggtttgccaagccgtctctggtcttgtacggagttacatcgcatggagaccggggaactgcataattggcagcgaaagcatgaggggcggtgataaaatggtgtaaagcagcttaatgcgagatggtaagatattgagaatgatcgaggtcacaaagcgtgctgtgcacgtttagccaggcacccagaggcgtggctatagttggtggtgtgaaggccttgagatatgagggttgtggtaaagatcaggaagagtttctcgacgagtgcgcatgggatttggatatgacgagctgtggtggtagccgccccgttgtggatgatcagtgatgccagcgaggtgctcaatacaagaaataggaattgatatagaagctaagagctcgtttgagcaaggagaaagcacttaattacacaaggcgagcaaaatctggtggggtatgtataaatgacattccgagatcgaacccaatgcaccttgaagttcaaatatatagctgcttctgacaagtcaacgactgtcattgtgttgctctttctctttcacttctcttgagaccgtttctgcctcaggttgataagacctcccccctacattgttcgatcttccttcctcttccctctctctttgctagctaacaacccatggtccctttcaatcaacttcctacccttccctcttgcaagtacctatcgtcaacctttttattacgtgttggctgaaatctcatccatctacgtatatatattggccttatgggtgagtgagaaatgactcaaagttgaatgcaacatgagaggccattaggccctcctccttgccctacagagcgtgaacgtcaactctggatagggcgccaatagaccacccacgcttctggcgcttctcaacacccccttggtccatgccaaagcagtgttgatgcaagtcatgggctatcaaagcactgctgcttgcgtgatgagggaccatcttcccactgcgtcgttgtccggggccttggtctagaagcctgtggaaactgccattgggctgaccaggacaatcgctcctatcataaataggctgttgcaattcacgcatcccaacaagctcgagatgataatatcaatataccgccaatcgccctcatataatccccctggattcccgtgttggtattcccccacacgaatgttagcgagaacgagcacccacctcaccgatttacacttccgcgggtcctggctcgggatctgggacccagctagggccctataatgggccaagtgacgaaacccaactccaaacaaccatacattctccgctccgtcgagattccattacagaaagtgaagccgaaagcttatacgactaaaaatacattgatataaatcatatgagcacttaacacattcggtaagtttgagtactcacgctatgtctattacaatagaatgctaatatgaggcaaattttgacagtggaaagggcgagagcttgaagaacgtggataattccaccgacgcccctggtgacataggtcttcacttttcattaactataattgatgagaagtcaatgggtggcctagatacattgttttgggttgagcagcgatgccgtcagatcttcccaaagtctcgcgttcctttggagggttgactgtcaaaggccaccaaccttggaaactccaagactcgggtggagttcggggggcctccgctgcctcacgtgccggaagacctgacctgaccctacgatcgttacggacaacataaactcgcaacttctactctccaacaaaggtagaagggcagctaacagatggatggcgctgcgttactttttcattgagaacgcagttgcacaaggacaaatcaacattctccgcgtggacaccaagcagaacattgctgatttcaccaaggccctggcgaaagatcagttcaaatcttcgtacagctgcttggcatgacctgaataaaaggaggaattgtgtttttcatataaaatcttcaagagttgggatagggtctgtgagggggaagatggggcggatcccacatgttgtgtccgtaccgccctactgtgtaggtgtagttgcaactgttcgtcgcctcatgagcaggtgttaaacacctaccagcaattggacaaatttccgacacatatgctggcagattgtgcaaagtccacttccacccctcacaattgtgcctgccaaacctggaacctcgacctcgcgccgggtcgttccttcttaaaccgaaagcgaagtcaaggtttgcatggttttcagcgaggtcgccaggaagtgcatagaacccagtcgcggccgtagattgttttctcttttccttttccagccttgtacttagaaccccgaattgactgtacttctttcttccaaaaggaactggcactcaacacctactactcaaatagtactatggtttggtcttggctttgttttgattgctttctgttggtttttctcttgggatttgtgtctgttttgttgtgaatccggccaagaccttttttcaaccctcattactatcgaatagtccccgatatctacggctaggactccactgatccacttgttcatctatgaatggttggcatagctcccaggatgcagcaaacagtacactcattccgataatcgaaatgtcgagttcggcgaaaaatgcctattcacaatacttttcgcgaggctaagggcttccatgagctcgtcgcttttctgatgaaagtgtttgaggtgatccaactagtcccacgaatgggattgacttacgtgctctctagagagcgtataagaatgccgccgctcgattagacattgtggttctagcagataattacattttgaggcagcccgctaagaattggaaggaattgttacatctgatataccttccgatttggtatatactgagttattaccctcactttctgtgggcgaaagaagaaactcctttgtagaacctcattctatcggaacggcgaccttcatctgtgccttgtgtagttgttaggctgcacttttctttcattttgcccgaagctatgcatgtgacttagattcagatgatccctaactgtgagctgatatatttatatagttctcatgacaccagggtagaacgaatgagtatggatcactttattattcaatcatgcggcgatttcattgctctatcggatcaacaccattcaaaagccgtttaatcttccagagggatatcatcgcgtcaataccgagctgctcctctggtctgaagaacagtgcagtgtgttggaactgaccgtgggattcacggagtttgttgatgtcagactctgaaagaagcactgacagatcaaacacaggaaccttcgacccagtttgcgtgagagccacggagtccaaagagctactcgattgagacccatgatcagcagccgcggaattctgtgagccaagaagcaggactgcaccacattccatacgttcaaatggctccaggcttcctagagcctccttcagcgcagcatccgagtactcgggtagatccagggccttccagaccccattggaggtgtcgacgcgcttgtatttctcgaggactgcactcagcttcttgacaacgacatctctcatactgcgcaacattaatttcggcgtatccttcgaccaaacaattcttttctcatcattcgccttcacaggcccctggggatgcttccaccggaacggcaacagtcgcataatggctggtctttttccacccttcctggagagtggcactgaaatagatcgaataagtggaaggagctcagcaatgcgaatcacgagctggcgtccagtgcgcttatctgaggattttggaattggtgatgcaattaagggacccttctcctggccttgtatcgccatcgatttggtttcttgttggtctggaatggttggctccggcgatgagctaaggttcttggtcttattgctttgcagcgagtcctgcagcagacccacagggatcatataaaggtcgtccgacgttggttgtctaataagcccccaagtccccagcagggcagatggaagtcgtgcaccagttacagagcacatacgtgccggcgaagccagcattaaggcccatgggttcttgagcaggtcggcttcctcctgtgtcgtggggcgtctcttgcgattcttctcaatcccagagcgaggatgtgtaaggagaggggactgcggaagccgttgtgaaggaggagcagtttctggagtcgaattgtctgtttccttttccaacgtagtttcgttgggttggttggtttttcgcgaggtcgcgatgccgcgattgactgcctgagcatgtgaagtcgctagcagttgtcggaacgcactcaggcgccattttgcgtatgggatgcgcgtgcccacacactccattagtttgatggctggggaatagagctgatggtgagtcgagttcagttgagggcggaaaagatgatctcggagctgttccagtagccaatcggagccccttatttgcggagaagtttttgatcgaatagtgattgcgattcgcgttacagggcgtaagaagacctaattagcttctcaaatactagggaaagcttgtctcctagaatcatccgattctagacaaagggtaatagaagtaggccgtcgttggcattgtcgctgttgtccgcctgagctccttatcttagcgccgctcttatcgcgtcacggttcaccgtccctagcctcccggctgcgcgcatttccaactcggaacaactacaaatcgcctttgcatatttttgaagatgcccccaagaatacctttgcgccagctagggcgatctgtccaaacctcacccattgctattgcccggccggccggattcgcacgatgcttctcgaaccaaggacatttgctggcgcagcccccgcggagttggacaccgacgccattcgtgacagagacagtggtatgtttgatattagccatagcaagcaggtacttggtgtgcgtatattaattacattgaacagggaggtggctggcacacgtgtatgttgcgcaattgcatccgtcgacggagcttgcatatgacccgaaacatgatcagcatactaacctgtatcgcgcaatgcagatgatatattttctcgattgatgaaggtaattagaaaccaggaggacactccttctacaacctacccatgctaatcaaacctctaggaacgcatcatctgccttaacggcgaagtcgacgacaccctctccgcttcgatagttgcgcaactccttttcctcgaagccgataacccagctaaaccaatccacctttacatcaactcaccaggaggctcagtaacagcgggtacgtggacctgccccacggctatccccgagctattctgactaacgctctcacaggcctcgcgatctacgatacaatgacatatatcgcctcccccgtgagcacaatctgcgttggtcaggctgcctcgatgggctctctccttctcgccggtggcgaagcaggcaagcgctactgtctcccgcactcctcgatcatggtgcaccagccctcgggcggctacttcggacaagcgtccgatatcgctatccacgcgaaggagatcctgcgcgtgcgcaggcagctcaatgagatctaccaacgccacttaactggcaagaagcagttgtctctcgatgagattgagaagcttatggagcgcgattactttatgggtgctaaggaggcgctcgagctgggtgttattgatgagattctggaccgtagagtccagggaaaggagggcgctggggaagagtctaagcctcctactgcgtaattgcatactcaatgtgtccatggtgctttggtatataccagaggttctaatgtttagcccataggaaggaggtgttggccaataatcaaccgaggaactcgcgctttttctacaaaaccttaggctctggttgtttggtcattacactagcgaccagcactgactaggcccaatcccatcggttggcttaaaaagctggcctgctcccttctttctccctaactgccgtcaactcccgaggtctcttccttcaaaaaagttttttttctctggttagcccagacactattattcggcaactctcgcctgacaaccatcacatctgtgtcttatgtatgtcagaatggaaccgcccggtgcaaggtctagcgatgccgccagcttatcctccatagcaagtagcgcacggcttagtgggaatggccaccaagtgccatgctcgtagtatccaaaatggcgtgttccgccaagaacaaaacgggtatagcccatgcacgctcgtatgaagatcagaagaccatctggagccaacaggattggtatcaactaccaagataatcgccgaagccaccacaagaactgcaatggcactcctcatctgaagatactcctacttattcctaagacacgctctgatcgaaaggtataagaggagagaccttgttcttttcttgggcccatactttaattgttccctctccgaaattgcggtatatacagtcacataattctatcatattgcattcgcacgctcaatgcgaccatcagtcccaacctggagaccaaagcgctgccgaaggaacgttgccgtttcgggagatggcacaaagcccgatgtcgaccgtgccgccgcatttgagtggcgccactgatcacgaattgtacccaggaagctcatgttgacaataacagcctcgccagccgcaaatgtatccatcgggtgctcaccccgaccagcacttccagattccgcgtcggccgggtcagccaagagcgtcgtgcgctcatcttcaacctcttcgtctatatggttaccatcatgagcgggggaaaccgtttcaccgccatcctcttgtcgtaaaataccacgttcttcggcgtcatgatcttgtgactgggacccctccgcatctgggcttgtatctgtgattgtatctgtgggtgtatctgcattgggcgttgcagccactggggtgggtgttccattagtcttcacccgctcgataatcaagcccagcatgatgaaatcgattaggaggattaaaaggtcgaaggaaagaagccggtaaacagatacgggagcctgcccgatgaagtcgatgaacagtcccccatgtaggtagccgcgcgtttcctcgccagcttcgggacggatcaggaaagcatgaaagagcatgcagatgaggttactgccaatgatggcgccgacgaacggttgatggcgtgtgggttcgaaggggggtgcttttggcgtgaagaagatcaattcgacaatggcacgtattgcaaataggacaatcgagcagctagacatatgttagggttcgccgcggtgagagggtgggaccattggtttggggttgatttactccatgtaatacagggcggaaagttgacaataaattaatatgtcgagatcgcgcagcaatcgatcaatgaacgcgactttggcagttgatttgactttcttcacacgcgcattttggctgctgagcgtgcctgttggcctgggaggctccgcatcgtcataggatatgccggacacgtcagcgatgtattccgcatcccgaaaggcatcaacgtctgtcatagagggtcatgagggcttggacagtatccaacaaacgaaggtataaggagtcgaggtggagactccccgtgatttggtgagctggggtacagtagttccggtgtcaccacctacactgtttgattgcttgatgccaagatacgctaagctatctctggcacagtcagctgatttgcccgataccttcatatccagcttgaagagccaaggtatgggtttatacatggtctatcttgcttagaacgtcaatttaatatcgccttctcaatgattgattcacgtgaaggccttagtttgcggtgggtctacaaaatagtcagtgtgttttggattatgtttatagctcaggttatcacgtgatatatactccaattcgaaatcgcaacttgctcttattcaacatcacattggggtttttgtttttgaagaaaaaaaccaatcatggataactctgaatccaatctgaatgtagcaaattatgtcttggaatctggacaagctgttcaaagttatgagctcatacgtcctgcaggtcagtgttgcctattttcttcgacctaaacaaacactgatatcaatgaaaggcgtcatcgagagcatgtacaaaattcatcatgatctcggcatcttttcaaacacaattgtttgtgcgacatatgagcgagcagacaatatgcccctaactccggacataatgtacaaggctcttcccctggtgatttcggaacatcctgtcttgacaacaattgtggtgactcaaccatcgacgaagaagacgggaagaaaaatgacttggcaggcacgtctgagaaagatttgtttcaaagactgcgtcagatttgtggatattgcggctgagaaagagcagtctattcgattgctgcaggaggagcatgacacctggttcaataccgaagataagacgaaaccgctgtggagagttgtggttaatggctcgaagatattattcatctttcaccactcagtctgtgatggcaggtcagggatgatattccaccgcagcttactcgctgcacttaataaagtgaccagggcgcaacatgagagtgggaaagaggaagacataccaaatgattttgatgtgccaaatcatgagctgaagcctgagtcaatggctcttcttcggcttctcggcatgaagttcagcttattcattggtctcctgagctacctctcctctcttttaatcaaggtcttcctacggaaaaattatactttcttcaacgatgtcaagttcgaagagggtttgccctccacagacaacccagtacctctcgcccagcggccagtcaccaaggttgaaaggatgtgcctcagctcgtaccaactcgcagcatcacttaaagcctgcaaggaacataaaacgtcaatgaccaccctcattctaactctgattcacgcgacccttgcatcggatgtttatccaacggcaaaaatggacttatcgtatcttgcagttgacctgcggcgtttcctgccggccgagttttctaacactatgggcaactatgtgtccagtcatcagaccaattactggctcggcaagtaccgcagagccggagctatatccccagctaacgatacacaaattgcgctcatatggcagctaagtcaaaaggctaaagctgaccttgattctgcgatgttcacacatcgcacaccacttccagtggcgaacgctttgggattgacagctattggggaagatgatgagtctatcgcagcgggaatatacaatgttttagatgtcgctgtcacgaagaccttttgtgtgtccagcttggttgaatcagaaagccaatcatctgggccttggcagctgaaaggtacggagttctctgtggcagcgcagaaggcacgggtgggacccatgttgtattttgcaatcggaagcatgaaggatggcgagtgtgtaatcaatgttagttatgaggagggtgtgctccagagcagagttgtccggaaaatccttgagggagttgagagacggctgattatattgttgggagctgaaaatgcaaattagaaactgaacattgatgtaatgaggatttcagaacccatgaatgccaccaaaaagactcaaatcaccttgcctccttcgcttcttattcctaatgtaatttatttcgtaaacggcctgtgaattagtacattgtggcttgcttccctagtaactgcaggtactgcgccctgttccaagcacccaatagcaaaaatacctcagcgacgatctgatatctatacctagcagccgagtaagcagtcactaccaaccagcgccctttatttctcaaacccgagaacccgtgagagatccgagaaccaccaagcactacggcaatccgtcccgcaatcccgagtcactacggagtatacttgatcttcttaggctcgttatcgttatagaagtggctgtgttatattatttatatatataatttacggtataactagttatttactataactaagccttctataaatagaccaagctcttaaatgggcggtcaatttatgagcggttatatcggtagccccagggatttaccacaatatccacggggcaataatattactgaagaataatatgactgaagaaaaagctgccaatcactgagcgccaaggtcactctgttatgcatctcctaaggatctgcatatctttcgattttaggggcgcgtagtcaaacagtagcttccctctcagccacccctgtgaaatgcactaacgctggagggtctcagtggctatattaaatctgctatggcccttgattttatgaatattgacttattgtgttcaactatatatcaaaaatgaacggcacaattataaatgactgggttgacgagcctgatggacgagggacgtggggtattctatccacttgcgttctaacaattattctctgttgctggacatccgtgtccccaaatttacctgcgcaaaccgatggcgcgtttacgagatggcgatacaaattcgatctggcttgcattgcactgcttggatctgagttcctattgctgctggttctaggacagtggtcgtccgcccgccgttctattagagtaggtgataacttataagctggttcccaagcgacgagaaactgacagaacaggatttccacgacgccgggtataaaaattggacgattaagcatgccttcttcgccgatatggggggatttttaattgagcctccggagatagattgcttgccttcattccctctcaacggcaaacagctttttattttggtcaaagggggatatgttgattatccgagtataaaaaaagaggaaatcgaagataagagcaaatcagatcggcttgctaggtaagttaaaaacttacttcagtcaagccttttcttccgcttcttatactgactgtggcgggtagattgatcacaatagcccaagccctctggttttgcttgaattgcgtctttcgttttgcacagggacttcatgtcaccactatcgagcttaccacgctttcctttattctaaactttcttgtgacgtcttattgctggtatcataagcccatggatattgaaagaccagtcactttaaagcttaagagctctgtggctatcattcgcaaaaagctcgaccaaaacccagagtcaaagtggtatgaaacgccacttgacttcatctctcgtaatgagtggttttactctcggttttggagatattacattcaaatctcgcactctatgcgaatcccgctatttactcgacctacacgacgcccgtatgatcgcattccgagccatttcataccagtggtggatacccaggccgaaatcatctgtggcccagtaattcttctcttcagttctatttttttaattgcgtggaattatcacttccctacagagacagagaggctactttggcggattgctagtgtcgatgccctagcctacgcattggttggaggtcttcttgcgctatacttccacagaaccatattccaaccggacctcccatataccacagcccaagcttcattcgagcaaaaaggagaacggcatggatggattggtcgtatcgctgcgagattgagaaatattgatcctgagcaggacccaaacttggaaattcctattcgagctttggttccgatttcgtttctctgtgccatttacgctattggcagaggatttatcttaacagaagatttgattgggttgaggagtttgccggagagtgcgtttgagacagtctcgtggtcgaaatatgtacctcactggtagccatgatgcgctcaccaaatgtgcttcacttcaaacactacgatatcacgaattttcagagattactcgggcagctccacgtgccactgtcactgtcactatcacctcccccttcttcctgtctatcactatcatcttcatcactgtcgctgtcatcattaacgttgttttcgtcattttctttgccttggctcatggaagccatcaccctttcactcacaaactatccttgcgtttactctataaaggtaatgaacgatattgatgatactataagtacaaacgctatatttgaatcaatataagtaatatatatacactccgttcttctgagacttggaggcttgaaaagtctataactagaaatcgataaacacgataaggatgttgatagatttaaaaacaattttgtgactggacctcgacaacgaaaaatttgggagaaacaatgaggttcgagaattcgaatactcataatgaccagctaggtttatttgtgttcctttcagatcctttctcgcggttatctttgtctgcttgacagagaatcatccacagcaaacaaagattccaactaagagacccacttctagcgaacactctgtaatccgattgtcagatcacctatcaaacggaagtatcggctctcattggtaacaaacataacatcctagagccccgtatcatactaagctaagtctgctcgacatcatgtgttacgatcgcaacgtttgcttgtttgttatttgctttactgagcgagagttggtaatttgcattgtttacaaagcggtcaggacacagctataagaactagctgtctcccactttgcaacttgcttcttctttctcccctatcttagttattttgtattgaatgcactctgctatctctgaagacctggcacgtcacattataagggagaaaatgacagagagcgtgtatgaatggcgtgatggtctatcatacgccaaattatgctctcgcggcaccaacactgggcaaatgttccaaaatccgttgaaatcactatacttgttgagacctagctttgaggtcacagagtatcttgacagcggtgacatgaccgttgctcactgcccattgaagcggagtccggccactattatcttgggcttcgagattcgctcccagtttagcgagtgtctcgatagtaggaatatgaccgttcattgccgcgtattgaagcggagtccggccatcattatcttgggcttcgagattcgctcctagtttggcgagtgtctcgatagcgggaatatgaccgttgcttgctacgcattgaagcggagtccggccattattatcttgggcttcgagattcgctcctagtttggcgagtgtctcgatagcggtaatataacctttgatcgccgcccattgaagcggagtccagccatcattatcttgggcttcgaggttcgctcctaattcggctagtatctcgatagcgggaatatgaccgttgcttgccgcgcattgaagcggagtccggctattattatcttgggcttcgaggttcgctcctaattcggcgagtatctcgatagcgggaatatgaccgttgcttgctgcgcattgaagcggagtccggctattattatcttgggcttcgagattcgctcctagtttggcgagtatctcgatagcggtaatatgacctttgatcgctgctcgatgaagcggagtccagctatcattatcttgggtattgagattcgctcctagttcagcgagtgtctcgatagcggtaatataacctgtgatcgccgcccattgaagcggagtccagccattattatcttgggcttcgagattcgctcctaattcggctagtatctcgatagcggtaatatgacctctgttcactgctcgatgaagcagagtccagccataattatctcggacatcaagatcagcttttgccgctttgagtaaccgcacggtatttacgtggccgttgaaaactgctagtgacaaagcggtttcctggtcgcagtctttgagatcgtgtttggcattttgcttggtcaggacatgtactacatcttcatggccccgaaacgatgccatatgtaatgcagtctgcttcttaacaccagttgcgttgatatcccacttttgtaagagttcatccacgattccagtcacattattcatcgctgccagatgtagagcattcaatccatcttctcgattcaagttaggagtagagcgtgccagcagtatcctcatcagttcttcattgccacggtctgccgcgaggtgaagtggttcttcgccactggcagtctgctgttgaggattcaaccttttgacaagcagcttggctacctttgtttggccataccaaacggcatgatgtaatgcagaccaccctgatttatcactttggttcggatcccgtatcttctccaggagagcttttgtgttgttgtaatcaccttcaccggcggcctttatcaactcttctgataatttcaattggtcccatgcggtaaggtcaagtgttttcaaatcactttcccgtttcctgtattgcggattgagtaaaccatttttcatatcctcgatcatgctctgagcattttggctcctttcggtgctttgatggctgccatcgtgcgtcgtctcatcttttccaacgtgaatcttgaatagatcattcgggtcaaaatttgggatatttgacctgattaatggcggatggaaataaaccgggccgacataatcacaataacaatcgaaatgaatcttatcgcgcctaaacgaaggcttgaccagaaggcctctgcttattctagtctcactaagagtgggatcaggctcaatgagtaggatatgcttgtctttctctttttgggcgaggcgaacctttccttctatgagtggatgggcatgacctaagacaacgctttcgtctttgagaaaatcaagagaaatgatattccaatctccgaacaaattcccattctcttcaatctggaggacatcggctgaaagtgtaacaggtagatcatagatgtttgtagggcaccagttgtatccattcgtcatagttgctgaattgtggaacagatgcgcatgtgatattttgccaagcttctgcagaatctcttgataaatcttctgttgggggtagttttctggcaattcgattccaacaatgagtcctgaaatgatcgccatgtctcttggccaagatgtgtggcgtgaactgagaattgctagaagatcatccaatccgtcaacttcttccctccgaaatcttttgagtatgtctttcgcaagttcatgcttggtggtagggcaatcattgctctttgcttgtaatatgtctctgtctaggtccttcgtgatcgggccctcgggacctttgaaaatgatttgaacagtctgggacattttcaactccaatgccgtccagcctcggctgaaccaaggagacataacgatataaaagcatgctaagtctgcatcacgccattcgcgctctctaaggaaacaatcgtggaccagtgtgaccgccgcggccttgtagtttaggtgcatgcgctttaaagctttttcgcgaagctctttctttgttggaatgcagatagtatcccaccagagaccctcacagttgaattcgagagcaaattcttgaaacaactccagcaagcagctgttcacatcgccgcgggcttggcttccggtgccggtaccgtccgaccatacatgggatactgccatataccgctcgttgtgttgaagagttcccgtttcccataaataccacgctgtgatttgttgctccttgcggacagctgcttccagggtttctgaagggaaattttcaagaggacagcggcttccatcacaaggcggttcgtggcgctgtgtcaccagagtgaaattgactcgggattgctcgcaaaaatcgaaagtacacagctgatggtcttccttttttgtctcgtggggtgaattttccagcgaagggagtaatttcgggaattctccaggacctcccagtaggctcttggctatcgcccagacgcggttgcgacaaaagcccaattcgttcgtggctttgtcgactgctcgtaaggtggcctctgtatcggctaatgacaaggacatggctctaggggatttgtaaaattcgaataaatggtgtgatactggattgttcttgaaaaatagcagcgttatggaaaatttggaaaagctgacacagtgccagtgattaatattcccaaacatgggcggctatggagcagggccatatctccggagtattggcgctcgaggggtgatgcatggctatgtgcatatgggcaggagttctcgtgttcgaggtacgatggcggagtccaatcgagggtccgtgcagtctcgattcatgcttcgcccacttgactggaaatgaatcgaatacaaactgttgaggcgaagagaaaagaagaagaagaagaagaaaagcagttttgaagaaagactgagcttctcaaggaaaattatctgagagaataacagccatgctgaactctgcggaccctgtagagtaatgtgacggaaatatgcagtacgaatgtaattctctgctctctaggaaatcttggactaaataatttgaataatcaacgtgaatgtgcggaagtcgggtcatttgaggttacttttggttgagttgggtgacagctagtcacccgcgcactaacctaacacgctttgggcgtctctttcatgagtcggccactcatctcacggccaccacgaatgggttctaacggtgcgaagtttctgtggtgtaatctcggcgctacatgcatgtaagtacccaatttgtcaacagggcctgtgcctggccaggactgttcgtacccccaccacatccttctggatttcgacgttcaacggacattatattcctcattacgcaattttcatttgaacacaattcttccttcttcgaggaagaaatcatggcgccctttctcgctaccttactatcccgtgaacctcgatttgatccgactgtatcctctaacgaattcaggactcaatgggtccaccctagcgatgtattttccgtactactgatcctgggcggtgatattgttgctcgcgcgctggcacaacttgcaggaagtggcctgacgccagtcacattctcgtttggtatggcatctttaagccctattctaacgaagattccatgctaagtcgatgtactcgaataggatgggttgcgtactccgtctcggcgcttgtatctgccgttggcgaaaacaaactcatgccacagaacgtggattgcaaatgcaaagtcatcaatggcaagagtggatacagtagagacaactcgagctgggttataggccgtattgtgcgcgattttgatacatggagcggcactgctaccaaagagaagaccaaaaaacttctgggagaaaagtgggaggaactcaaatccctcgataaggctgcagaggagccaacaagagctggtcttgttgttactatctacgagccgagtgcgacaccaaaggccggcctagctaaacgcgatcttattttttggagcggcttgctcatcatgttattgcaattgggaattgcggctataccatgtggacttttcggcgattggggcattttgataattacggcatgcggcaatgttcttgccatcgtgactggagttctcccacaatggaagaaggaaaagtgggcgtgccggcctaagtccaagtattcctatattctcactcgaggtaacggtgcgcaacatgccatcgttattcttggtaatggacatggcttgaaccttgaggatttggcatctggacagagcaatgttgaatcctctactaataccttgacccgagctgttctcctcgccctctctatattctgggtacttcttctcatcgccgcagcaggtcttaggggaaacacttggtttcttctcgccatcggcggtattggcattgttcagaatgttttcgtcgctggtcgaagcatgaagccggagaattatggcattcatctagattatgtcggggtcttcggtaaaacgaaagtgatggatacactcttggatgttgaacagaagtatccaggcataggtcggagcatgcgtgacgagttctttcccggaaagcttcctctagccggagttcgagcgtgggaacagatcgaacaatccactgaatctgagcctcgagcgaaagcgcctcgggagtctcaagatgactctgaagaaactcaagctgaagagcgtcaagttgaagagcggatctaaaaagatccgaggacggctattgcacttatgattcaacgtcatcgcatagatatattgttcggtgatcgctattttcgacctgttcttgagcttatgatgaggcccaatcttctcccacaaggccggtaatgataggaaaatgggacggggagatttcattcataacctcctcggctctaattgatgcatcctcctattattgtgtttgattggaaggtctaaatcatttcttaccggaggaatcaagtttgattaacaggagcatttatttgaaaaatatacgatgcattcccttgccactctttgttcttatgcgagtccgagtcatcgcacatgccccgaatgaccaaacagggaaatgattcattagcctgcgacctccatctcaaagcaaaaaacgtcttttcccgctggaaggctatcccgaattgaagcatcctttatcaattgcttggaggaagtaagtcgtagtttataacagggctatcctcgtgctcggtccgctcgcgtcgcggtaccaaattagaagaatcatccgcacaaaacgcagcaccgcatgttgagttatgaataacttcgggctgaaacagtatgtctgtgactggttctggctgttcgtactactacttggagctctgttccttcgtatccagcaggcgcattgacatcagcctttgcggcgagaagtcgctctactacctggagatggcctccatgcgctgctgcttggagcgctgttcctccgtatccagcaggcgcattgacatcagcctttgcggcgagaagtcgctctactatctggagatggcctccatgcgctgctgcttggagcgatgttcgtccgtatccagcaggcgcattgacatcagcctttacggcgagaagtcgctccacgaccttaagatggcctccatacgctgctgcttggagcgctgttcgtccgtatccagcaggcgcattgacatcagcctttacggcgagaagtcgctctacgaccttgagatgtcctccttgcgctgctgcttggagcgctgttcctccgtatccagcaggcgcattgacaacagcctttgcggcgagaagtcgctctaccacctgaagatggcctcctcccgctgctgcttggagcgctgttcctccgtatccagcaggcgcattgacaacagcctttgcggcgagaagtcgctctaccacctgaagatggcctcctcccgctgctgcttggagcgctgttcctccgtatccagcaggcgcattgacaacagcctttgcggcgagaagtcgctctaccacctgaagatggcctcctcccgctgctgcttggagcgctgttcctccgtatccagcaggcgcattgacaacagcctttgcggcgagaagtcgctctaccacctgaagatggcctcctcccgctgctgcttggagcgctgttcctccgtatccagcaggcgcattgacaacagcctttgcggcgagaagtcgctctaccacctgaagatggcctcctcccgctgctgcttggagcgctgttcctccgtatccagcaggcgcattgacaacagcctttgcggcgagaagtcgctctaccacctgaagatggcctcctcccgctgctgcttggagcgctgttcctccgtatccagcaggcgcattgacaacagcctttgcggcgagaagtcgctctaccacctgaagatggcctcctcccgctgctgcttggagcgctgttcctccgtatccagcaggcgcattgacaacagcctttgcggcgagaagtcgctctaccacctgaagatggcctcctcccgctgctgcttggagcgctgttcctccgtatccagcaggcgcattgacaacagcctttgcggcgagaagtcgctctaccacctgaagatggcctcctcccgctgctgcttggagcgctgttcctccgtatccagcaggcgcattgacaacagcctttgcggcgagaagtcgctctaccacctgaagatggcctcctcccgctgctgcttggagcgctgttcctccgtatccagcaggcgcattgacaacagcctttgcggcgagaagtcgctctaccacctgaagatggcctcctcccgctgctgcttggagcgctgttcctccgtatccagcaggcgcattgacaacagcctttgcggcgagaagtcgctctaccacctgaagatggcctcctcccgctgctgcttggagcgctgttcctccgtatccacgaccttgagatgacctccttgcgctgctgcctggagcgctgttcgtccatttccctctgcggcgggtgcattgacatttgccgttgctgcgagaagtcgctctaccacctgaagatggcctccttgcgctgctgcttggagcgctgtttggccacacactcgtgcatccacgtgggtgactacttggagcagacttggtagtaattcactgcaaccttctctcgaaaccaaaaacaatccatgattcatgagagcaggagaatcgcgtccgtgttggataatacacctggcgagacgatgatggccattggtgatggaacttcgaagtatatgacgcttgatgttctctgttaaaatataaggctgacgccttatatagtacaaaagcaagtgataatgtccatatgctgacaaccattgtatcgtctgcggtacatcgtttctatcttcgtaggccttctgcgctgactcccatggtctgtatgcaacaatatcattcccttctacacatcggcagaacaatgaccaagccatatcctcagattcgggatgtgggtttgtgaggtgattgatccagtgatttcgggcgtattcgagaaagtgaaaacctcggctttggagttccatctctagacgtgaagactctttgtcaccaagtatttgttgggccttcctctctagctccccagcgctgagatgccgtaacttctcacggtaagaaagtagcctcagtgccattcgaccagtcatactgctgtaactgccgaagggggacattccaagctgaacaggccgtataggagtatttgaaccattctgaattttcgtcaactgacgcttaaaatcagtgaaatcgaggtaggtcatgcaaagaacgccgatatgccaatcaagtcccgccatattgaattcctccgagtgtcgggagttcgtgccaaaaaggtgtttcttcacgctatgatgaacatagtgcacagtgctgtcctcttcgtcgatgaatgttagaccacaacaatcaccaatgaccttattcatgtcgttggggagcttttttcggtcaagagacatttgtccaggaaaaagacctaaaacctcctggtattccatcgctgtcaatggccgcttcatcacaccacaaaattggagaattttgaacgcgtcttttcccaaggttctctcccgtacacggctgagttttctgtcaaatatttcagataggccacgagggggatgcttcaatgcatctaagatgtcgctgtcactgccttgttcgcagagctcttcgatgaaaagacgcgtccagaggaacctttatcgatcagcctagatacttgcaacataaaagtccaacaactttcactcctaatgataaagaattcaccaggacttcatgcctagctcgattgataaagatggtggaaaacccctcatcccgtcgcttgaattggatcatttcatcacttacattccgttggatcccttttttagggtttcaaatatcttcacaatgagcgtgggatcccccaagatcaattgtttgtcttctaggcagttgcctatagccgcggcaatatagcgatccatctccaagtcaacttttgtctcggtcaccgggattttgtatttgggtttcatggctccaaacaattggttttcaagctccgggcggcctgtatagagaactttgaagtttttaacgcgcatgttacaaagtttggccacactctgcgccaccttccggatctcgacaggttcacattcatccagtccatcaatagctagatagtatgtattgtcatcgtggagccgagacagtacgaaatcaactacttcagccgtattgaggtcattgctatcctcgtataggcgttgtagactttcatcttcagcgtgtttgatctgagagtctaatatttgacgagcaagactcccgataatgtttctcgctgacagagatgcagtgttgtccgcacgacaaatgtaataggaaataatgtcattggtatttcgtgaggcatgaagttgggcaaccacattagatataagcactgtctttcccatacccatcgtgcctgggcaccagagaattgcagtattttggtcatcttgccaatcatggaaaaggaactcttgcagtagccactccgctgtggagggcacgcgttgttggatagcttgcttccagggtttgacgtagtcgatggtagaaagattttgtctaatgctagatctcaagcttgcagcttccctcttcatcatgtggattctccactggtgcgcctcagtgtgttccttttgggtttcttttcggaatttatttgtcaactttcgggatgctgcgttattttggctctcgttttccagcaatttttttgtttcctcgttagcctgctttgaggcaagtgatatctgcagctgtatgtcctttgtagcttgctttagtttatcgagagggcttttgaaatcagactcgaagggattgaaaatagacgataaagtttgcgtgatcggcgggcgtcttgatacttcgatgatcttggtacacaattggacgatggctgcatagtactcgcatagctcacgttgaaggctgatacagtcgggataaagttgaccaaattgttgataggttggacacgaccttccgatctccataatcatttttgtgaccttgtcgaagtaagatgtaatattgcttgccgtcaatatagccatcttaaccccccccccccccccggggggggggggggggggggggggtcccaaacgccccctccaaccccttccctcccctctctgcctcagctggcccctcctctcgccgtggccnnnnnnnnnnnnnnnnnnnnnnnnnnnnnnnnnnnnnnnnnnnnnnnnnnnnnnnnnnnnnnnnnnnnnnnnnnnnnnnnnnnnnnnnnnnnnnnnnnnnnnnnnnnnnnnnnnnnnnnnnnnnnnnnnnnnnnnnnnnnnnnnnnnnnnnnnnnnnnnnnnnnnnnnnnnnnnnnnnnnnnnnnnnnnnnnnnnnnnnnnnnnnnnnnnnnnnnnnnnnnnnnnnnnnnnnnnnnnnnnnnnnnnnnnnnnnnnnnnnnnnnnnnnnnnnnnnnnnnnnnnnnnnnnnnnnnnnnnnnnnnnnnnnnnnnnnnnnnnnnnnnnnnnnnnnnnnnnnnnnnnnnnnnnnnnnnnnnnnnnnnnnnnnnnnnnnnnnnnnnnnnnnnnnnnnnnnnnnnnnnnnnnnnnnnnnnnnnnnnnnnnnnnnnnnnngccccagattagggcggcgatttgaggattggagctgataaatgtacccacgacatcactgaactgttgtgtcgcctccagaaatgtacacaacctcggtgccacacatctccttgtcgtgctgttgttggcgtcgatctccgtcacgaatgcgatgacgctcgcaacgtctggtttcgtagcgctgactttatagagtcccctttgctcctccgtcagaataccctcgaattcaatcaacgcctcccggagagctgttgtcggatgcggcacccgtatcgaaccggaatgagacaatgctacacaagccatcatgtcctccgcggccgccttgatatcaaagaaattgcgatttgtcgaatttttggacaggggatgggagggttcggatcaaatctaaagatacgattcccctcagctgaagggggctgagggtggtaaaacgtctaagccacgttttgtcaggcaacaagctgaagagcggcacaatcttagcctaaagtatgggaagttctagccactccatacagtaacaagacacgatgtacatgtatcgcttggcgtaaagaattgtatagtacactcacccttctcacccccggtcgcgcgaccgtaaaacggcgctcatccatttctcacccgggcgacacccacccgactatcgactgcgtataagccacacgccgctgagttacctagttataagctcctcgcctacgtaaggatcacgttgcggggtgacagaccatcgcagaccaatcgcattagaaattcggaggctaagaatagtccggggtagtagttgggtgggtgaccaccagcgaatcctcactgttgtatgtttttgttttgctttttgaggtagagaatggccgtttttggcgtcaattctacaggtcctcatattctggtgtagactactgggaatctgggatattaatacttcgggtagtggattttcctcggcccggaccacgtgctttccccaaggtacatgcagtgatgcacagtacgtttgtgttttattttaagatgtttgagtgtttatattcgaatgcttggaaatggaatactggactgtttgaatagtattgattgtactacttcatctacttattcacggtaagcttaatccacaatgatcttcttcgacagctctgagtaatgcttgaagaagccagtgaacaaacgaatggcatgggcaacatcataagtaccacctgtttcacggatactgtgcatactgagctggggattgcctagatcaagtgtccgcgcgcccagcgcagcagacagcatagggccaatggtgctgccacagctcgagtcattacggaccacaaagagctgaagaggaacgtggacgccagtctccttggtggtcttgcgcgcaatctcctccaggagaacaattccaggagagttcgtcgcatagcgagcgttggcgttgatcttaatcaccaagcctttgttcatctccggcttatggtctgattcgtacttccccgaatagttcgggttgaccgaatgagccatgtcggcagagacaaggaaggaggtggacagagtctgctcgtaggcagttgacaggtcggtgctcttggaggaggaggatgggaggacggatagacggcgaatgatcgatggaagaatgttcgagtccgcaccctgtgctgtgcggcttccgatttcctcgtggtcaaacaaggcaatcaggcggatcgcttcctcgtcgtcgagggctgatttatcggccacggagtcaatcagaccaactgtagcacagaaagtgctgttcaggttgtctagacgaggggagaagatgaattcctccagcataccgccgagacaggacttttgagtgtcgaagaggatcatttcaaagtccagaatatcactgggactgacaccagcctcgttagcaataagctcaacgaagtgagagtggtgacgttctgtgacagatttcaatggtgagaataattccccacccttgtctgtatcaggggtgtcggctccatcattgcggttaagctctgcagcaataaggccagcgatagggaacagctgtgtttccttattgaatgaaaagttttcctggcggtccagatggatggccagtgttggaacacggaggactaccttgttagcaaggcacatttattgggtcaacatgaaacatactgggacggtcaatcttgaccagtttctgcacgatggatccatcgctttcgcgagtcataacccgcccagcgacaccgagatcacgatcgaaccctgcaggaaattagcgactatgatagtttgaaggtaatcaatggcacgtacaagtgtgccagatgcctccgccgtaggtctctacaccgacctggacgaagccttccccgctcttcttgctaacgggtttgaccctcaacaccggagagtcggtgtgggcaccgatcatagagatggcattgcccggctatattcattgacatgattaattgaaagaccatttacgcagttccgcaatttatacatacctgccattgcttgccgatcgcaaaagccacgagggtagtagtgttgcgagtcaagtagtacttgcctcccggttggcaggtcgacgcccaagagtctctttcctattgatggatgagccacaatttattactccggtattcagcttgagccgaccttgatttcttgaaagccagccttatccagaagctgtttcgcttcgtggacggcatggaaagctggagataagacaaatcagcgacattccacgtcatcgatagaactacatacgggtaggagcagcattgacaaaggtcaagaagtccagagcaggttgcttggcagccattgtagaataacgtcgagaacaaccaataatatcaggacaaagacgcctaaggaccattgcagggtgcacaaagggagagagttggcttttgccgccggaggttttaattggtttggcggtgactgcggccatgtcacgtaacaaagccaccagtgaaactagaagggagtcttagggccattgatattcaggtattcaggacatggtaggtttcaattattactatttgaacatggatatactattctttggtcgaccccactatgtaaattcctagaagtcaggcttggtatcgtcgttgccatggcccaagcttcgtcgcgtcgcgtcaaagcaagcgcgtatatcgaatcaataatctgtggatttcgcgttagtgaaacggtcaatatggagtacagatccctcacatcccccccactttaagtggtccagttagacggtgtgggcgcgtccctttctgtaaacaacaggactaacactgtggcatcagtctcgattggaacaaagccatgctgacacaggacgtttccaggaatctcggcaaacagcatgagacatagtctgggggagtaaacaaaagagatagactccactgctgaaataaattgtcgatcaaatatcaatgagcgtagtcaaaggcaaagacactggatggggccgattgccctcgctaaatcgggttagcgtacccgacgcgtgacctagagagtcgccctgcgcaactccgtcactcccttgaagacattcattcattcacatgccgacagtttagacgcttctgtgttcatttcctggtgaaagagggtttgatagtgctttatcccggaacttgtgccattttcaggtgttaacagccggggcaatcattccacctttggatcaacaacaacggaccctccgccaatcgcccttcaaatacccttgattctacacccgaatctctgaacgttcgacatccttgattcacagaacttcacttacatctcatgcaattcttatctctatcttgatcggctgcacttcgtctctggggctcgggcagacagctagggaacgccatggcggatagacctcagaatttaaacaaggccgggaataggtcggcaacaaaaccacaaaaatcgcaggtctcaaatatcgcatcaccacctggatcgaagacaccgccaagcatgccatcaaagcgcacgatgtattttccagacaattcaaatttggggaacggccaacggcaggatggagcagagccaatcgaccctagtgcgcttgcgaaagcattgaaggattatgagtctgctgggagccggcgggacaggaccccagcctccagtccgtgtcgcaagagacagcgggtctacggggatcggtaagccacacttttctccaatcagaaagctgcgccaaaacaatggcagtcatctgtgactcagctactgatcataattcagcttcattcccaatcgcgacgggcaagatctacaagcgacctatagtttattgcatgaagatggctgtccatctactccttccaagaccaagaaacgcccccctcactccgagcttcatttccaaaagagtgtgttacatctcggaacccaatgcgttgtacatttgacctgactttaaccgcagctgaggaagccaaccgtacattttcccgagttttgcgcagcgagctgttcggaaacacggtcccacagcctgacttgacctctgcgccatccgacccattgctcggcttcagcaatggaatcaatgacaagacccgatcccatacacctcccgctcatatcgcagccaatctccctcctgccagcatcaccccaaccaccccacacaaaaacctcttcaactatgggccttcacggcccggatcgggacacccaaccccctctaaaacccctcgaagtgtgcatggccctaacttagacgtgcgctccgagctctacagtctttcccctattcgatatgacagtcagcgtattctggaaacgcctcggaaacaggcccggtatgtgaacaaggtgccttacaaggtcttagatgcgccggatcttcaggatgatttctacttgaacctggtggactggggcagtagcaatgttctcggcgttggattggcaaactctgtctacatgtggaactctcataccggtggagttaccaggctgtgcgagctgaaagatgataccgtgaccagcgtgagctggattcaaagggtaagcaagaagtctgcatgttaacgctccacatatcatactcatacaggaaatatagggcacacatcttgcaattggtacaggtaaaggtctggtacaaatatgggatgctgagcattgccgacgactacgaaccatgattggacataccaaccgagttggcgctttggcgtggaacgatcacattctcacttcgggatcccgagaccgtctcatttatcaccgtgatgttcgttctccagatcagtatattcgaaagctcgctggccacaaacgtttgtggtttgaagtggaacaccgaagatggccaattagcatccggcggcaacgacaacaaactgatggtctgggataagctgagcgagacacccctctaccgtttctctgaccacaatgctgcagtcaaggccattgcatggtctccgcatcaacatcatcttctcgcttctggcggtggtaccgctgaccgcacgatcaagttctggaacacacaaaccggctcaatgatcaaagaggtcgacactggtagccaggtctgcaacctatcttggtccaaaaactcagacgaaatcatcagcacacacggttacagccagaaccaaatcgtcatttggaaatacccgcgtatggaacaaatcgtctcgctgaccggtcacactttccgcgttctttacctcgccatgagccctgacggccagactgtcgtaacaggagcaggcgacgaaacactcagattctggaaaatattcgatagacgtgctacaagagacactcgtcgggaaggcagcaaactggccgaatggggcaccattcggtagttcgcaatcccctctatttctaatttgcctttgcatctgcattcgatatggcgttttgcggttcacttaatttggtcactgggggaaaatcattgcatggcctgcggggatctgactcttcgtctttttatgcgtcggcatctattgcatcttcttttctatcggtggtttagagcatttcaggtggacgtccggcgctcgttcattcggaatggggtaatgcttgtttgagttttttttttccttcaatttttctttgctttttctgttttttcttgccttttttgatctcttccatcggttccttccaactctggctgtgatttagcctagttatactagccagacgccttcgagtcaagcgaacaactttacatccacgtttcttgggctttgagcggcggcgcttgtggtgtttcctggttgctggtatgcggcgttgcgcggcgggtgttctcattgcaatttgtctttcgcagggttgcttttgatgatgagatgaccctctttttctccggcacgaatttgtgcctatgttcctatttcagaggatttagctatgccaaccggccttcatggggatatacaccatggaaatgagaatcaaacttgataatcacttacatgtttcttggaagtccaaggctgattcaactcaactaagaccaatttttattattgtggttcaattccctttctcaagtgaagtaacccaattaagaaaatatccgattaactatgctatactgtatacattcatgaatgagtctcgcttgcccagtttttggctcagcaacaaacaaaataaaaagctcaaaaagggagatttgaaacataaggaaatctaaagcaccaagcgcgccggctcaacagagagaagagtcttgattcgctccaagaatgccttcgcgcggacctcctcaccagcagggactgtcaagctgaaaacattagaagcaacacccgcgctctcaaccgaagctgcaggtgcagacttcttggacggcttggcactaaggaaaccgatcaggtcttcggtaacgggcttagagcggacagacttaggagcgtcgaaagcgttcaggtcgggaacgtaatcaccgcgtgatgtgttgatcggctcggcgccgagaatctcatcgaaaagctcgtcggcggagggcttagagttagctgggcgaggcaggtcgtcgttggcaaggtctgtagccacggcaaggaagcgggacagcggcactgtcacacccaggttatcttggagcttcttctgcgcagacagcacggcggccagggaaatggagatggccacagaagtcaaacgcggcggctcggccacaaccttcttttcgggcacggccggtgcggccggtgcggccggagccgcaatcttgatgttgctcagatcgaggtgggtaagcttggcaagtgtggcggcttggtttgacgggtagttcgcgggaatcttgccgatgtatgcaagcacgtcgcccttcaagagacgacccttggggccggaggctgggatcttggaaacgtcggactcggggatgcccttctcacggaggagctgcgcgacggaggggtagagtggataggcgatattctgggttgtgatagaggtagattgcaggcctggagagtgaaatggatgacgccgttagcccatgtagtaatgcttgttatagcaaataagttccgccgtagcattgagctcagaggaccggctttccgttgcagagatgttgttcgccatgaacatggataggaaactcacgtctgccgacaccgaacaccttcggttgacgtcgagcgaacatggccggaacctgaccgactgtgatcctggctgccattgctatgtgattctgttttggaggattgggagtactgcggtgccgattggggtattcggccggtgtcgcaactcgccgcagacgctagatttggaatgaacgagcagaatcaacgaagagcccaccaccacgttgaagcgcacagatctccaagttcgatttaatttggggtcgtgtgtttggagagacaatccaaagtaaccgttggagctgtggagggcgttgggagctttcaccggcggccaagacgggaacctttttctgccgcctgctgttttggctgttatcggcgaatcccgatgagaacgacagttgaccgattctcgtcctagtaagttacagaatgaacctattcagtcgttgactattcgtccattttcccccggattcatagctgtcaattgactacgtgctatggccttaatcgctttactaacttgaacttccataggctcatcgcagccatgtccgtcagaccacccaccttctcaatattctggcgccaatgcctacaaagtccaatgcgacctggctttcagatgaactcgacatcttccttgcgctacttcaattctagtgcaccccattacaaggtcaagggtgtggccagaactgtcgattccgcgtggcaggccgcaagtccttatgggaacaagaacccccgtgccctggcgaagctgcaagcgaaggtattaaaagccggacaagtgcttttattcaaggcgccttctcatcgcccatatgtcttgactgcgtatggtctgtccgcgttttgcttcgcctattccatctacaactcgaacgcggttctccgggatcccctggttcctattccgatgtggcagaaatctctatttggtggtatctgtatcatgatgagctttggaggcaccttgttcatcctccgaactggctccctagtcagaaatatcaaggcgatcaattccaatggtcgtatgcgcgtcctcttcacagtccgaagcttggttcctttcaagaagccttaccaggtcgaagtggcgccgggtgatctctctttcaagcgcagaatctctgtctctccggaaaccatgaagcattacgaggaaagtaccaaactcggacgtggattaaaaacggagccaaccttgttcacgaggctgcaatctatgcctcgtcgggttttccagagcgtgcggcaacttttcacaaacgaggacttcatcattgtgcaattggcggggcacaagacccatttccgactggactccaatggatacatctcagatgatctcctgcactttgggcgcatggtgaatgtgaagatgccattcagagattgatcgatgatcatatccaagtatcatacccagagggtcgcttcatgtgtcgtatctagttcagtttgtacatcattttggctctgtctcttagatggcgacaccctgtaacactagttaaaagcgcgatttcaatcgagaatccaacaatttatatcattagagtattgcctgtcagaaaacgttgtagcatgcaatgccgcatcactaaatttgggagccacgtgatggccccggcgcgtcctaggtggacgcggttcacccgctatcgcgcccctcacacatcttgcgcacaacttaatctctgcttaaataacagggttcttgaattctcggcgcgttgctccctcagggaagccgctggcaatatgggaaaactcattcgtttggagcttttcagtatgtaccgaccggaaggtgcgcaggcagttgctaactttgttactagacttcaagtcctacaagggacatcatgtcctcctattcggagatgcgtacttcacctcaattattggcccgaatgggtctggcaagtcaaactcgtgagtgcctcctcgcctcagtctaaaggacccaagctaacgcgcgttaggatggatgccatatctttcgttctaggaatcaagtcctctcacctgcgatcgagcaatctccgggatcttgtctaccgtggccgtgttttgcgcacgtctaaagtggacggagaacctgctgctgatggacaggatggcgaggaagaggaagggccagagagcatggatgtggagcaagatgccggtggaaacgacccaaagtccgcttgggtgatggcagtctatgaggatgatgcgggtgaggagcaacaatggcgccgatctattaccagccaaggtgtcagcgaataccgcatcaacaaccgaatcgtgtctgcccaccaatacaacgaggcattggaggaggagaacattctgatcaaagcgcgaaacttccttgtgttccagggtgatgttgaggcgatcgcatcccagtcgcccaaagaccttacccggttgattgagcaaatctctggcagtttggagtataaggtcgaatatgaaaagttcaaggcggaggcggaggaggccgcagagcagcaaaccatccagctcaaccgtcgacgaggcatcaactccgaagtgaagcaataccaggaacagaagcgagaggctgagaactacgcgaaaaaggccgaagaacgcgaccaggccattatcactcatatcctgtggaagctgttccacttccagcggttgatcgacgactccagtgctgatatccagaaataccaaaatgagctcaaagaataccgccgtggcgttgagaaatatgataagaacgtcgaggatgccaagaaggaccatgctcgagtcggcagagatgttggcaaggctgagaaaaacatcacaaaaaaggagagggagattgaagaactcaacaactcacttgtgcctgtggatgagaagatcgacatcaccctgaagaaggttgagagatacgcgtcaaagattactgagatcgaaaaggagcgcacatcacaatccaacaatggcaagcaactagaaaaggacctcaagcttgtcgaaaaagctcagacccaatgggaagttgaatggcagaagaccatgagcaagaagggtggccagctgagcgaagccgatcagcaggagtaccgtaaactcagagaagaagtgaaccgacgttcatcggcggactcgttgaaccttgacaatctgcgacggcagagaaagaccgaagctgaagcagtcaatagcttgaagggcaagtttgagaacactgaatggcaactgaagtcagttgaatccgatgtccagaacatgaacgaacgcaaggcgtctctcaataacaccgtcaagtccacatccaaagagatcgagcataagaagaaggagttgaacgccttgacttccgagcgtttgaaggtctcgcaagtgcgaactgagctcgaggaaaagcttcaggtcgtgttaaggaaacttctcgaggctgatgatggtaagaagcagactgaacgcgaactccgcgccaaggagttgatctcggccttgaagcgcatcttccccggtgtcaaaggccgtgtcagtgatctttgccggccgaagcagaagaaatactccgatgcagtcagcaccgtactaggtcgacactttgacgccattgttgttgataacgagaagaccgcgaaggagtgcattcagcacctacgcgaccaacgcgcaggtcaggccacgttcattcctctggaaactattcaagtcaaggcgttcaactcgaacctgaagggcatgcatcggggcatgcgccctgccattgagactattgactatgatgattcagttgcacgagcaattagttacgcgtgcggcaactctattgtttgtgacgatctggcgacggccaagtacctttgctacgaaagaaatgtggatgcgaaggctgtcaccctcgatggaactgtcatccacaagggtggcctcatgactggtggacgtggtcctcaacagcagaactccaagcgctgggaagattccgaggtcgagaacctgtataaattaaaggagaagctcatgggcgatctcgcgaccctccctaagagtcaccgccgaggctctgaggaagagaccctgcagggcgagctcgtcggtctcgagcagcgcctcatttactctcgtgatgagttgaaggctcttgaaaggaacctcgagagcaagcttagcgagctggacttcgttaagcgccagatggaagaactgcgacccaaatacaccgagcgcaaggaaaaccttgatgagctagacgagacaatcgaaacgtcacaagcttcagttagcactgtcgaggatgagatttaccgcagtttctgcaagcgcctagggtatgatgatattcgagaatatgaagcccagcagggctctatgcaggaagaggccgcacaaaaaaagcttgagttcaccacccagaagagccgaatcgagaaccagctcagctttgagaagcagcgtatccaagcaaccgaagaccgaatcaacggccttaaggcccaatacgagcgtgatcagggcctgattgaagagctacaaagccagcaagaaggaatccgcaaccagctcgatgagttcgaagcggaacttgaactcctccgagaggccctcgagaagcaaaaggaaatctatggacaagcagcagaaaacttggcagagcagcgtcgtgaactccagaagcgtagcaagcacgttgaatcagcgttaaagaatgttaatgcacttgaagcagacattcagagaaactcttccagtcgttacactcttttgcgccgctgcaagcttgaagacattgatattcctttgaccgagtcttccaattcccttgacaaacttccaatagatgaccttgtgcaagcagcagaccctgatgccatggaggtggatgaaggagatggtttggacgagactgctcaggtgcatgattacggtatcgagatcgactttgattctctgggtgagaccctgaaagaggtttgttctcctatccattgcttatttgtcacatactaattcaattccaggaggccgatgacaagctcgaggatgaactgctcgacaaggtccgtgttctcaacagtgaccttgacaagatggcaccgaatgctcgtgccatggagcgcctggagagtgtcgagaacaaacttcgcagcaccgaaaaagatttcgacgacgcccgaaagtctgcacgaaaggccaaggaagagtttgagtccgtgatgaagctgcgatccgacctcttcaacaaggcattcacccatatttctgagcagatcgggcccatttaccgtgaactcacgcgcagtcccaattaccccctgggtggtcaagcgtaggtttcctcaactcccgactttgaataatcgctaacatctcaaagctacctcgatattgaggactcagacgagccatacctggacggcatcaaataccacgccatgccccctctcaaacgtttccgagacatggagcatctctccggtggcgagaagaccatggccgcactcgctctgctattcgccattcactcataccagccgtctccattcttcgtactggacgaggtcgacgcggccctggacaacaccaacgtcgcccgcatcgccaactatatccacgaccacgcctcgccgggcatgcagtttatcgtgattagtctgaaaaccggactgttccagaacagcgaggctctggtcggtatctaccgggaccaggtcgagaacagcagcaaatcgttgacgcttgatgtgagttttaatgtggttcgtatgcgatatggaaatatgctgacaatgattgttccagcttcggaagtacacctagatcggtggtatttatgcggattgtgtgatgaccctttgcttttgctttgcttatttcttcatctttgtagattattgagtcttgctggtttgttttcttcttctatcagtgtcgatcataggagtaggaagcccagtgtctattctgagcacttattcctatcggcaaggctgttaattgataccagttcctgtactgtgtttttcaagtcgttccaatctttctcatacgtcgtacctgcggatagccctaaaaatatccgtttccgaacacttaggtgccgactgttcatacttctacggattccagaaagtggctcgtagaggacttctcgaaagtagatatgaatagattcaattaactccatctaactagatgtgttaaggccaccatgttgaaaacctcctagaagatgctcatggcaaaagataggagagagataccaaggcctcgcaaaaaaatagcaaaaaactgaccacctgtaaaaccacgaaccgactgacttccaccatgtagagaggcacttgttgaaagcaccggcgtgggaagagacaaatcgaagtctcaaaagaagaaaaccgagaagaacaaaaccaagattgagaaccgtgaaccgaaaagacttttcatccgcgagacttgcgacctattggagggaccaccatagcgagaggcaggtagtcatcgaggcctgataagtcagatgccaactagtttgtcgctgtctgtgccacaacctcaatttccttcgcaggcttcaccttgggagtgatcttcatcccagaaacagccttggctagaatagcagccttggcctgggcagcactctttacctgggcggcattcttggcttgggcggcactcttgaattcagcagcagacttaacctgggaagcagtcttggaaggagtagcagtcttgaccccagcagcaggcttaaccggagtagcactcttggccttagcagcagccttggctagaagagcagccttgacctcaggagtgatcttaaccggaggagtagccttggcctgggggataactttggcctggggagtaactttagccttggttccattggcggtggtatgcttggtctgagaagtagtagagtcgacctgagttgctgtcttggtctgaggaatggcctcgggctcagtgacgggctcggcttcggtgggcgtcttaatcccgctggtatcagtgagatcctcggaggacgactcaatatccacgccagaggcacgaacagtctcaggagtagcattaggggaagcttccgaaccagtggtctcggcgacagagacaggcggagacgggttggcttgttcgccctcgccaagtggcttggggacctggttcgggatgctcatgagaatgttgttcacggcatcagggtttttgtgaatgtggaccgtgtgcttgagcttgtccttgaccttgaagtcacagggaatgagacggtaggggagctcctggtcgcgatggtactcgtagagccggactttgtagccacggatgaggatggcccagcatcgttcatctggaagaggggcactgagaagtcggggaacgaactgatcccagtctgcctggactgaaacagaggtgtcgaggacgaccttcacgatggtgtgcagggatctttcatcgccagaggctttcacgacgaagcagttggagtggttattctcctcgtcctcttgccacttgaggacccagccatcgttcgaatcgaaggcgtaagtaaggagagcgctgaccatgatcttgacattctcagcggttgggttagcctcgtaggcgttgatgaattcagcaatagcaggaagcgagagatagtttgtggtctccatgattacgaagttgaaaagcgttgctggtgagcagagattgatgaacctggagaggaaggaagtcgcaggaaggaagtggcaaggactgaggtggaaatgcttaaggtcttggaatcgcaagcgagatcaggaaactgcacgtaacgtgaaagtgggaaagtgtgcgtagaagagtgaattgaggcaaacatttatacttgtagggttagttctacctaccctataaacgcgtgtttgatcaaagaaggcgaattatcaaagcaaacattagtctcccacttgctactgatctgtataacttcatatgtttctatatgtactattacaagtaacatagaactgtgagctaagtgaaaggtcgccgtctacgtccatagatatatatctagatctagtgttagtctgccaatgactccatattctgagcattcaccaggacacaagcagactgaaaagcaaatgaaaggaagccaagagtaagccaggaggaaatatatactgagtagacaggatgatgtctgctgggtccttcctatctgggctgtcgtcgcttccatgggctcggactgagatgacttcagggcttagtaagttgaatgtctactgagtgcactcaggcaaagtgtgcgctacaatagatctcaatacaacaaattattatcttctattgttcaaagtctgctcattgactcattttgtcatctcaccaggccaagcagaatcgtctctgactaccaggttcaagctcggctcatcccaaaataagttacatgagcttcattcacatgtcctctctgggcctcgtagctctagacctcatttgatcaatactagagaggagcaaagatcatacctgaggccagactcaacagaatctgcatatcctcctcactagtctctgactttgtaggtacatggagtggccaagcccaccatcaagctctgagcgactgattctggcgggggatttccgaccgaataagttctcaagaactggtgatcaccaaggcgtgagataccatatgcggattggagacaattgcaggatgtcctgaaagtaatcacagagctgcatatactgcacactcacatatgtacagcgacatgatctatacgatcaggtccgaaggcatccatgactgaatggcgtgcctagtacaaatgacaccgtacgttggaagcatggatgagattcccgttatggcttcctgcctgagaaatccgcaaggcgggatagtggctgactggggcaccggaaacgaaccgatcgcctattattgctcggactcttagccatcagggtgagactactgacattgccttgttcgtatacgaatcggagaatggcaagcccgtgcgacaaagcgatgtcacgattggcaaatactcgggagtcaagggcttaaaattgagaatcctgatcaagttgataggagaagcgacccgctctcgattttgggtgtgttctatcgagtcatgggccccagggtaactggaaagcttgagggccgttcgtatcgagccctacccctgtacctgggttgagaccagcagttcgcaagtgataaagtactggaatcctgccctatacctccagcgacactgtgactggtcagcgtgctgaaccccgactttgtatagtcggctgcatctgcacagacactccttatctatcctccacgctcgaagcggttctaggctctcccttgacaacttaatggagcgctttacacagacggaatccgtgcccactaaggataaaaccaagcttcgacggggtatcgagccaatagctctaatcgcctctccctgggaacccgacgccaagaacggtgagacgaacaacggggtcatcgggtgcagtctacttgggtatagtcaacgccaccggccaaggaactgtgagcccatgttccaagttgcaaatcatgcccagtgtcaacgccccggacacacggagacgacctgagtgagagttccaataatgcaagtctcctgcaccgataccctgctaccgggatttgggcatctgcacccagctagcaatggaaatgggaagtcagcgggagcttcgggtgcattacccgagatttgtgcttgagaacattgcgcaatataagtatactacagcagcgacactcgatattcggttatcgagaaaaaaatatagtgaatatgcaatcgatcgtggtgtaacggtagcagtacatatatattgtgggaacagctggcgtccacgggcggatggatctgctatgcgcataatgtggctattataggggatacattgtacagaataatacacacagcgcacaacagtagagtcgctcgtattgtactgtacgttggatgtcgtatatcgcgccgatcatttcgtctgcggcccgcacataggcaaggggcgcatgtcttttgcacactgaccattcgattctcgtgtggggagtgttgggtgttaccgagttggggccaatgcggctcagaagggaaaaccccgtgtcactgattgcgtggaagtattttgctttttcccatgaggctgcctggcaaacggctggatattcgattctcaagccatcggatgcgtaccaaagacagaaagtataaaaggcggatacctgctgtccctgtcttcaacgggattacagtatactagtccaatgtcacgatcaacccgatctctcgcactataaagtgaaacagtaccgttatattaacagcacggaatatgcggcccgaggcccatcggcgagcatcaaagggcgacggctatattttccgcatttgtaggtggagtcgagcaataagagcgccctaaaaagcaaacacgaacaaaaacaagaaacagacggtggggaagacgaagggaagatcctagctaatcatagccatttccaataattgctggtcgtatacggaaaaagaaacaatgccatgatagttacgcagtagagtgatcaaatccgcaatgatcagcttctttcccgtcctgtcgacactgtcgatccgggagcagggaaccgatcccaatggtagttgactctttcttcttctggataggatggagtccggatacgacaatatcggtgggaatgcttctctagctccgggttgcgacgtccgcgtatgcacgatgccgaacaggagttgaatctgaagactcataatgtgtatttgtagaaaaagaaagaagagaaaaagaaagaagccatcacgaaaataaaaaagaaacaaggttgaccaggataccgtcgggcctggcatccgcgcgtccggaagcagaaaccgacttccgcggacttgaaaataagctcaagattcgatggtcgcgtttaccctcgtatacgaagacattcatggacccctgttgtacatagattaggttgaagggcacggacaatggtggaccaagcgcggtggagatggacattggactgacaggaggaagcgaagagaaggaaagaaagggaagcaatctgcggcgcagctgatgtacggagtagtcgagcgtatccataggagatccatcacgaaggagagattcacctagacccattagtcagtgctttattagcctctcttggcttgcaggagatgatctcagaggcgtccaggatgaccgctcttctttatcacttgtcctgcccagggatcgccgatcggttgatacgattggatggtgatttattgattactctatgtctgcatgtattatttctgattctgataattgggctagagagaagtggtgtatcagacgggaagtatttcagaaatggattgctgcagatggctaagacatcgttagggcagttagggcaagctaagaagttaggtaaatcatttaattgaataatcaaatgatttaaaatagaaattgagacgtccagaggtgtgggccgatctcggatcccccgacagaaccatggatcgaacaaggttatgtgacactcatccatggctcacagccctaagtgtcagtgcgcagaacggactcgacccatcgactacacatcgcaaaggggcagacgcagatgggccaatcacagccgccacaccgaagtgatacggaggctgccctattgccacacgctcgctttcgcagctattcctttttccttgcattagctccacgccgattcgtgcgttcaggagacgtcggggtggagatatgccaatcctcggggtttggcgtcggaaatgggagatcatggatagcccgtattggacttacttggtatatttatctccccttggaccctgcccctgatcgaatggtcccggacttcttatccatcggcaagctgtgttgactcttctattaattgacaccgtggattgctgggcattctgtatatctgtgcacgttaccttgaaaagcgcagcctgacctggattcgacttcaaccgtactatctgattctcaccatggatatgaatcgatatccagttcccgaagaggtcttggagagaagacactctgatacgtgcatcccacaccagcatatgaacatggtaatagaactattgcaaaccaaggcacatcagtgggctaacaaccaatagccgatcactcctaaacagccccataccgaatatacacacccacacttcgccatgatatacctcgaccacaacggtcaatggcaactacaagcctcgccctcaattgcaggctgcgaaggcgccatcttcactcaagatgttacagaccgattcatagaaatgactggccagacgccccaaaccagtccgcagttcccaagtgagtcagattccatccaagttccagaacgacgctgacatcctctccttgcagacccgacccaagcaccccactccccttgggacgagcaacctgcttcgggatgggccccgcctcaggcgcgacaggccgagatgatcccgttccaatggtcatcacagcaaagccgaaaaaagtcgaggcgtgccggcggtacgcccaagtctcgaccgaaatctacctcgccgccgcctgtcgctccggctcccgggcggacggtccttcgtgtcgggaaccgggcgctgctgcgacggtactatgagaaggcatttgaggatttccagcagctcaactgccgggcgattgcgaaatcctatattaagcttgtcgagccgaggaagcaggtccactacccgtataacgggcgcagggtgattgccggtgtctcgcagcgtgttgacccggagttcacgaagcctgcgtggtggcctgctggtgtcttgcacaaagagcctgatcatctgctcaaacctggtgagcatatcctagtatcacgatatgaaccagattaatactgactgaccatagatcgtctgcgacttctggttcatatcctttgtgaactaaaggatagccacggagtcacaacggataagctgcgagaagctggccaagacgtcagacggcagatcacacctgcccaccggctgcaggttctcgacgagatctactttgtgcgccaaatggaagaacaatatctggatggtgaaatcggtatgtatccctatcccggcaagattcaatctacagttcactgacatgtactatagacgccagcaccttgattcagataacacagacacatctacccgaagcaatcttcccagacgatgacctatcatctcgtgcacacgcagcacccgtaacagccccttccatcgaggccgaacataacatgcacgacgcccgcgacaaccctgttatctccacgctggaagacgatgacccaaagctgcaccactcgcatagtctgcccctatcacccactactagcgagtccagtggtccacacagcccaactggcagtttcggctacccaatagccatagcaccctccgtgcatgtaataccccctctcgagtcccccaatgtcacaaagtctatacatccagacccgagttatctgtcggggtactactcgcagcaattcgtgtctgataaagcgcctgggttttggccacatgccaatactgcctcgcagtatggctattgatgttctgtttctcttgttttccagtacataactggagtttgagcgtttggctggacacggatcttgggtttcattggttacttttccatatatatattttcttaggatggtttgttaattagcttccatatacgagaagtcagggagaatgcaaattaatggacaacctgatctctcgtagagtcgaccttatgaattagctgcctcaggagtcaggcgacacctgggccaagacggctcgctgattgggtccgcgtgacgatcccctagcgcagctcctccatccaaccaccactcacatcgccagcacacgtcaattcctcaccttctcgctggctcttgactgtgtgtttctccaaccttttggcctgcaccaaagcatcagaagccctacatcgccgtttccgtgccatgcgccagtaagcccgcagttgtttacttcttggatcgccaaccacagtccgccatccgcgccctccgactccaacacacgcgtgatctaccgataaggtaactttgccgtctctttggatgattacccctcatatctatataatggccgtgtcgttcggcacttgtgtctgtttggcacatctaaaaagtgcttttgaagcttgcaactatggggatgctaactttcaatcggttcctcagtcgaccgtatcccaacacccgggacggaccgacaatactctgcttccagcaacagtttctaatggaaagcaccggctcgaggagaaaatccgataccatgtcggccgagcctccggtctccacgccagtcgtggaggatgtgtcttcagatgactccgacaacgatgaatccgactctcctgccataaccccaggaaccctgtcgcgcaacggctccttctcaaacagcagctcgtacctagaagactgggagtcatttccaccgctggacaagctgactattttcgacctcctcgacaacatccacctctcacagcgtctggagacttggcagcagaccctcgccgcgcaaagggagaaggtgcgcaagcagcgggagaagctgaggttgtcgtccttgaatgccaaggaccgtgttatgggtgaatggaagcgccatgcaccgaccgccgaggagaagctggagaaatatcgtgctcggatgaagcatggcgttgagcgtctcggcaagcggtggagccagacggcgactgtcaccctccgggagaagatgtcgtttattgctggtgtgctcaatatcttcatcagcggctacctgatcggtgcttgcccggagtacttttactactggtttagcggccagctggcttttttcatgcccatccgctactttacataccatgctaaaggctaccactacttcttggccgatctctgctactttgtcaatttgctctgcatgctgagtatttgggtcttcccgaactcgaaacggcttttcattagcacgttctgcttgactttcggaaacaatgcggttgcaatcgccatgtggcggaactcgatggtgttccacagtatggacaaggtcgtcaggtacgttacacatcgaaaggaacaagttcatcgctcatcttatctagtctcttcatccatattatgccacccgtgactctgcactgcatcgtacacctgactccggttgcgatactcaaggaacgcttccctgctgtctacgacatcaagttcagtaagcccggggacccagagcattatggtcttggtgccatgatcctctggtccacggccccctatgtggtgtggcagctcatgtaccacttcctgattaccgtgcgccgccgcgaccaaatcgcagcgggtcgtccgaccagcttcacctggctgcgcaagtcatactccaaagcgtggattgggcggtttgtgctgagtctacccgagacgctgcaagagccatgctttatggtgatccagtacgcgtacgctttgtccaccatgctcccctgtccgatctggttctggtacaaatgggccagcggtctgttcatgtctgcgctattcgtctggagcatccacaatggagcgacctactacatcgacgtctttggaaggcgcttccaaaaggagctggaacagcttaggacagatatggctcgttggcagaactctcccgaaggatcaactagtcctatccttatccctgagcccagccctctcagtgaagccatcaatgcacacagcgaggagaagcgatctagcgttgatcgaatccctttgttggaaactgccgatgtctcctctactgatataccggagaaagacaacaaggattctgttgttcgagagcgaatttgaacattacgagataccatgttgacatcgttatgccagtctttatataccctttgttggttcttgtcaagattcatgagcctgaattgagcgagtcggtttatagatgtacacgttattagattgaatgaatgttatgaaaatacttctccgtcggtccgttctcgaactgtccgggatctctttaaccccgagcaaaacccgaggcggtctcggccgtcacgtgccagatgactgcggcagtacatcacaacatctcgtcggatccggttccaggacattccaaacttgtgaccgacattttattactgagattttttttttggatcatcctctggacattaagattaatcattaatttcattattgttgccctataaaccccctgttcgctcgttgcttcgtgcaccaactttttcaccgtttcccgcaaatgtccgctacaatgagatcaaccggattagtccgcggaacacctgctttccggtctgcactaatcggtaagtgacgagtccagaaataaatggaaatgccagttgctgatacttcccagcaggccgtagtcgttccagtgcattgagcccggcctccattgcagcccgcagccttctacgaaatggccgcgatctgccatcccagatctcggccctggccatcctgatcccgcagcgtggatatgcgacggagccaacccagtccaccaactcttctcagaactaccctccccccgggttcaatgccgagcaggccaagaagccgctcccccaggaacagaccacgcagccacaatcgacggtggcgaagacccccgagacacaggcggctgctaagccggctgcctctggagaggttgcgaagacgagcgtggaggagcagaagttggctgagaagaagagcgcgaaaaagttgacgtttggacagaaggtcaagaaggagttgcagcattactgggatggtacgaagttgctttccacggaggttaagattagttcgaggctggcgttgaagatggccggtggttatgagctgagtcgtcgagagcaccgccaggtatgcgccactacaatatttcgatttgacgattggctaactgagtttgattagctccaacgtactacaaaggatctgggacgtttggttccgttttcgatgttcctcatcgtaccatttgccgaactcctcctccccgtcgccttgaagctcttccccaacatgctccccagcacatacgaggggcagaaggcccgtgatgccaaggcattgaacctcagatcgacccgcaaagaagtttcggcatttctacgcaacaccattggcgagactggtctgcctttgaccgcagccactgtcaagaaccacgaattcacagacttcttccgcaagattcgcaccaccggcgaatcgccctcgaccgaggatgtcatcaaggtgtgcaagatcttcaaggacgatctgacccttgacaacttgtcccgaccccagctggtcggcatttgccgttacatgaacctgaactctttcggtaccgacgccatgctccgatacactattcgccaccgtatgcgccagatcaagcgtgacgaccgcgcgatcttctacgagggcgttgattccctctccgtccccgaactgcagatggccggcgcctcgcgcggtatccgcacacacggtgtctcccccgcgcgcctgcgcgaggatctcaccatgtggctcgagctgcgtctcaagcagggtgtcccctcgactctgctggtcttgagtaacgcctacctatacacacagggcaaggagaccgagttctcgtcgcaagtcgacgcgctcaagtctgtgctctctagtattcccgaggagctgttccacgagatcgaactcgaggtgcacaatgccgagggcgctgctaccaacaagcagcgtctggaggttatcaaggagcaggaggagctgatctcggaggagaacgagcagaacagcaagaatgaggtcaagggcgtttccgtacctaaggataccgaggatatcgacgagaaggaggagactaaggtccagcctccggtcgatggtgataagcagtctgctgaggccaaggatgctttagcggagggtgagcgcgccgagaagacctcggaggccaaggatgcgaagaagagcgaaagcgtgtagttatattgtttgatttatcttggattgtacttgtcatatagatttcctttactttggccctcatttggttttcttcccttcggttctctcctgtgttatttatttcgtgttgatagaccatttgatccccgcctctcccttattatgttcctgtatactctattgactcccatatctctaatacaactacatccgtggataaatcaaccgtaacacttgaagtactctccggatttatatcattagtcaccgacattccaaattacctcggctacaaaccccatcttcccagtatacaacctggccacggagtactccgtccatatctcggtccaacaaacccatttgaaatgctctcacgaccacagcgcaaccttctccaaagacttcgtttcagccacgcttaccaaagcccaacccaaaaccagcccaaatcatccatgcactccaaccccaaccccaaccccgaaccccgagcatccaaaataatgccgcccctaaatccaacctcgcaggtatgtgtaacttgttctctgcagctacccgaaaggaccgcgtgtcctgtgggattccgaatctgaatctgctgtatccattttgccatgcgcccctacgatcatgtatccctgcgggtgttccccctgcttcttttccccctgagccacggggggtgtgtcttaaattgccatgtttcttttctttttttttcctgcgacgatcatacctggatgtgttattatccagggagcggttcggtctcggggctatgggcgtttgagtttcggcttccagtcttacgtgtgttgggacctgtttgaattaggcaggagatgagatgagatgagatgagatggaatattcttttctttgattgtctgagacaaggttcttcacggtccagccgagacttgaccgttcgatttctttttccccgtggatggacatcccgatgttaaacgcaaccacagtatagaaaggaggaaagaaggaatgctgatatttacttgcacatgtatcaggaggcaatcgccagacttcgaaattacatccctccgccaacaacgtactactcggtcccggtaagcagacgggcggcagtgctgctactgctcttcgccgacgccaagggcgatcttagggtggtggttacgatccgggctaagacactaagttcgtgtgagtgaccagaacttagaaaatacgtggatcagccctgttcccaggctgcatgacatgggttggttgttcgggactaggctaatgatattcgggtctacggagtagacgcgggagatgctgcattgccaggtggtaagtttgacagctccagactctgcaaggcaaaggcaaaagagaaaggaataaaaaaaagaataaattcctcgcttaaaataaactaaccccttcttcaccggagtaggccgagcagaaaatacagaatccgccttccaaacggcgcggcgcgaggcatgtgaggagatcggcctccccgacattcaggaaagggaaaagcttccacccccgttcagcgtggagcatctctgcgagttcccggcaaatcttgcccgaacggaggtggtggttcgtccctgcgttgcgctcctccacagttatgatgcgggcttggggctgaaatctaatcctgaggtgtcacttattcctattctggacacgagagaggttgaggttgtttttacggcgccgttccaggactttctgcgcggacatggagagaatggggaggactggtatcgtgggtcttgggggatgtggcataattcgcaatggagaagtaagtggcctccccctatgttgatgtatgtgttgtgtctgttttgtgtgtgggattgccaagtggaggacgtcccaaataggaaatagcctggagactaactacgccactagtgcatcagttctttgttcccagagcagaccaagtctaccgtatctttggcatgactgcacgcattatcgtcgacgcagcccgggtcgcatacgcgcaggaaccggaattcgaacataacagtcattttggcgacgaggccatgatcgccgacctgcgccagttgggccggttaggtgaaaaggccaaagtttaggagaaggactgtgcagatagacatgccaataagaagtatataaataagacggccaatcagacgagggcgtaagcggatcaagggcgatcaagtccttgcgtcagttcgtttgacgatgtctgtttgttaataagattaggcgttaagggtctgttagttataagccctgatctctccttgcatcggatatcattcataacttcactcttcgtctttctttgttacacctacttatttccatttctttgatgcgtatttgattgttcgacattcgacatttccaaatgccaaccttgtacacccgaatggctccccccgttcgaccatctcgctcactcgaaggactcgagcgagtaatcccaccactgtcaccccaacctcccttctcaaatcgctccgatctcttcctcaacaaacccctccccgcaaaacccctggacccagaatgttcggcgatgtggagtgactccgacagcgacaccgaaagcaccctcgacagcatcaccagcgaaccccgccactccgcagacagctatcccatcggcatcttcgtcagttccggctccgactttgacgacttgggcgatcacccgcctccagccgatcagctcctgagactatccccacagcctccacataaacgcacggactcgatcgatatcaatatccccgagccgtcagtctcagtatcgtcttcgttttcgtcccagtacggacggccctcgaactggagccagaaccgcacgggcacgaatcactacttccgcgagaaaaagtgggattatttcccggaactcgcgccctccgctgtccaagcaagtggccgcatcagcccaaacatgaacaataaatcccgcaaaatcggaaacccgctggaattcgccaagggcaagtaccgctggcactcgctcgaccgcggcggtctcgtcggagtgcgtgactcgatcaagacgtacgtgcaccgcactctctcgcgcgactcgacagagaataaaccaaaggaaattacccgtccggcgacggcgcctatggaccaccatcttaatgatgtaggcggtgcgctcggtaacacaccgcagcaatctactttagctttggttttggacacgcaggccgcgctgcgagccccgtccgtcgcaacgtccagcagcagcgactacgactataccaaccacagattccatcttcagacaccgacctcgcctacttcgctttcatccccgacaacgccacggcagaaacagctcgccgtgccgctatccgcgtaccagaaacacgggcccgtgatctgggacgcgcccaagaagactaagaagcgcaatgttcagttcccgagatacaagtccccgcctggatccgtggcagagccttcttcgtcttcggctcccgatttgtcttactctaatgctacgctggcttcgcggaagtcgcagaacaatacccggggcgtgttcctgaaacgaattggggagtccaaggatgatcgcaggagggagcagttgaaggcgcagatcaagttggttgggcctgttaatccgcatacttatgtgcaggctgatccgtgggtttgattgtgtttcttgttttgtttttgttcttcagcactactctcatgacttctcacgacatctatacctatctataccctcttcacttatgtctttgttcttgtttttactgcatattctgtcttgttctgtggcttcagttgtaccttgttattattagattttctaaatatttccaaacaagtacttctagctcaacttggtgtaagccatgactcttggaaatcagtttcaatcataccattccacctcatttagatactcaactgcgtcgtaaactcaataatcaattaaacttctctgcacaacacctaatcacctctacagacgctagtttcttacatgcacatccataccgcacaggtgcatacagccaacaaaccaacgtagatcgccactgtcaggcaactccagtcatatttgagatacacccgccttgacaccactctactccgcacttagtcaaagccacgtctgccattatccttgtattatatattccaattggttcatctcagggcaagggttcctactgcctgcaatgcaatccaagaaattaaattaaatgaggggtaaaccagggcctgaactctcttaccaactcgcactgagatatttcctgagtgtaaccaaccctcgtgttggcaagcagttctccgcacaactagcggtgggtgtgtagatgagctgttcgttggggaatagccctatcattattattgtgcggaatgtggatgtccactatatcgggtgtcatcaccgacttttagaattgtaagttgctcggcctaattactctaaggggagttgggccggtctattgtagaaaccaattaatgagaataatactgaataatatccatgctgtaggacatgagatacgttgatcaaccccactttgcatttgggctaagcgttgggctggctatgtacttcgctacatgaagaaacgaaggatatgtgcgtatccgagctgtcgtcgggtcggtgatgggtcggaattcgacgaagatctagatgtcggatcggatgtgttgactttgtgttcatcttggcttggacaggtcgaccttctcaagttctatgttccaaggttaatatggtggcttactgtgggtatccttggaataataagatcgcacctatctcaattctagaagcgacttgtatctatcatgacgaggtcgctcatcccgatctgtattttggcctctgtggcggtatgctggtagaaagggccgctagcagagtctagagctatgagcattccatggtgacgatttgatatagtttagggctttgtggatggtcgctatcaggattaacagtcagcttctatacttcacggtatagaacttggataacctgaatatcaagttggttaacactgttctatcgcttgtataatcagatttccagaacaatggcttttttcagccgcaaactaatgtacaaactactttttcattgttattgcggtcactttcaacaggacgtcaagactagaagacagaggataatcatggaagtaattcaatgtgccatctcttgtatccatattctagtccggagtcagacaaactataccacagcgactcattcatccaacatacaaagggttttacaccaattacaatcaactgatgactgcacatagactcaagatctccacttgaggcaacaatgagatccctccaagcggagtcgccgctgacctaaggtgcggccccgttttcttctagtatacgtggacctcatacacggcgacctagtatacggcgacctaatatacagcgacctagtatacgcggaccaacctgggtatataagtcggagacttccccacgtcagacgatctttctaccaacctacaccgctgcagtcatccctgactgcagtcaatgtcagacatggtgacatgtcctgaccatggaaaggacctgtgaaggtctcttcatgtggaatctcaggcattgcctggacttgggcttgttctttttgatgtgcctttcccggtaagtgaaatatgctttgttctctcttgttgtgtcagtcgctaatatgtatatgggtaggccactgagaattttggtcgctcgtctcaagggcgatattgatgagtcctttgaaatgacggggcagatgaagagcgtcctgaccatggaaaggacctgtgaaaaggtctattcatgtggaatctcaggcattgcctgaacttggccttgctctctttgatgtgctttcccggtatgcactatgctttttctctcttgttgtgtcagtcgctaataggtatacgggtaggtcacctttgagattttttggatgctcatccaaagggtgatatcgacgagcagttcgcaacgatggggcagatgatgagtgtcctgaccctcggaaatgacctgtaaaggtctactcatgaggaatctctggcatggtgccctggttttgcgtgttttgtttttgatgtgccttgcctggtacgtgaactatactttctctcttgatgtgtgtgtcgctaatgggtatacgggcaggtcctttctaagagccatttaacactctcccaaagggtgatatcacccagagcattttgccatgacggagcctgtgctggaacaatttcaggcaccggcttaatgatcgagtgactgtctaaagctcatcaaatccgtgcactcggatacaatgagaacctcgggcagactggtttgatgtcgtcgaaaagataaagcatctatcgacatagaaaacgacggatgagacctcttggtcagtggtggagcatgtgggtcgatgagcgtgagtaactcgagatacacttgtcaggtcgtggaaagatccctatactaaccaaaagtctagtccgcaatgcgagcttctcgtgcgtttccctgcaagggacgctcaagaaggtcccggtcgattgtgttggagtttatcaagctgccgcaaggccttcgcttgctcttctgccctacagaagatttcttgtcttggattcgaaatgtctccaagaccaaaggcaaaggcaagatggccggggggggggagaacggagggcgttgatagggtgggggttggnnnnnnnnnnnnnnnnnnnnnnnnnnnnnnnnnnnnnnnnnnnnnnnnnnnnnnnnnnnnnnnnnnnnnnnnnnnnnnnnnnnnnnnnnnnnnnnnnnnnnnnnnnnnnnnnnnnnnnnnnnnnnnnnnnnnnnnnnnnnnnnnnnnnnnnnnnnnnnnnnnnnnnnnnnnnnnnnnnnnnnnnnnnnnnnnnnnnngttgatatggtcggggttgggggggttgaatcggccgatgcggccgtggctgccgacgtcttccattgccccgaccccggccctagcaactcaagagaaggatcttttggaagtggaattttgagctatgtttcttgttgcaatcaccgactgagaactggcccatgtcggtggcctggttcctttttctcgcgcgggccatgagcctgctgctcgtgtacctgaaacatggtatgaggtgctgaattcctggggaagcgttgatagagggaggtgtgtctcccatctcataatctcaatacggagagttcccacggggaggcatcacttcggaaaaatcacaagttccttgatatcaaagcaatcaaagcaatcaaagcaatcaaagcacattgaaagccgtcctaagacaacaattggaacgtcaagtatagaccgaattccgctcttcaagcctaggttaaagtctttgctcatttcttctttctatctgataccccaggaagagagagagctgtgtcaggtcgcattggagagatgtcagtttggcggaagtcgagcaccatcaattccgatagctaggagagataaatcacgggcacagcgcaagaactcgactaagatgccttgagaataaagaagtagatgttgtactccgtgttgtatagttgacgatcgaatgccaaggaaacatcagagccccgccattcaccgaagattcaccttcggagtatggacaccttcggggtatggactcttgtcatgactcattgctccgatctgcttcaagtctgagttctttcgttacctttgtgcgcttcgtttactgcactctagactcctactcctctcggcatcatggcgcaagaatcctcgcaagtcgcgccccgctacctgaccggcgataaggccggcctccaggaattcctagccagattcgatgtgagcacacgttttggatctaccgatgtactagagagtcctgttactaaccagattctgtacaggtattcctcttcgactgtgatggtctgtcccctctgtatcggccgaagctccccgcagcgctgaacgcgtcgcaacaaccgctgagacaataatatttaggcgtcttatggtccggcgaccacctcttccccggaacagtagagacactggagcttctccgaaagaatggtgcgcattaaataccaagtgcgcaaacagaggttaataatccccagggaagcaaatcgttttcgtgacgaataacagcaccaagtcgcgcgcagactaccgcaagaaactcgaaggcttagggatccctagtacagtggtcagtgataccaccgattaatcacctcacccagtggcagcgactcacaaccaaacaggaagagatcttctcctcctcatacagcgcctctatatacatttcgcgcatcctccaactccccgaaaacaagcgcaaagtctacgtgatcggcgagacaggcatcgagcaagagctccgctccgagaatgtccctttcatcggcggcacagaccctgcctaccgccgcgacgtcacgtcagaggactacaacaagatcgcggcgggcgatgagtccgtcctagacccggaggttggtgtcgtgcttgtcggtctcgacttccacgtgaattacctcaagatcgcgctggcataccactacatcaagcgcggagcgatcttcctcgccacgaacgtcgactccacccttccgcactcagggtcttttttccctggcgctggctccatgagcgcgccgctgataatgatgctgaatcaggaaccggtcgctctcggaaaacccagtcaggctatgatggattccatcgagggtaagttcaagtttgatcgtagccggacttgcatggttggtgaccgtgtgaataccgatattcgctttggacttgagggtaaacttggcggtacgctgggtgtcttgactggtgtctcttctgaggaggagttcgtgtctggggatgtcaggcctcatgcttacttggatgcgctttctgatctactagcctcggagggggcctgaaagatttgtattataacaaatgttgtatttagagatagacatacgaacacaatgattcacccatagaatatctgtagccagggctatcctatcgagtttcgcttcttccatgacaaaatgtcttcatacgggtatgtgtactacaagtaataccaaacaagtcccctcgtagatcggaaatatcaatttaccctcggcaattctccccactcaatgatgtccagttccacagctccggggcgatggacctcgggagttatattcaggcattggaagccctaattagttcactaagagctttccaaagttgataattaactataactaccagcttattaaaaaggataaggaagtcccctaaatccaaaggtcgggtttattctacaattcgataaagtccaggtctctgttcatgcgcctttcagggcttaattgttgcttccatctcgcatcctatacctccagccttcggtgaccggcaaaaataaccctatcggatggcctactgcatagagatgtcaccatccctatcgggaagagcgctagctagtgcagtaacaaggattccctgtatcggtttagctgtgatgtaagagattctcctagaatcaatactcacgatgtcgatctgttcaagaaggttcattgggtcgatagtatggtccttaagggtagtgtcagtaatgaatcaaaatagttcagctgggggatcttgtacgcggcagagtgtctcgacggcggatttccaaagagcgaatagtggacaacgccgctgaaggtgtctggggtcgtggcagaggtaacaggccggtgtgatggcgatgctgctctgtgacatactctttatttgttagttgttggtctaaaagggtttgttctcagactggttatagatatgagagtggcatggtggagtatgacttacctgatgctggtgttggccttggtgttgatactgttgttgtaggtttcggtgatactgttgtctatcgtcatgaccagctccttgggtagctctaccagcacgattggggtcacgactagctccctggtgttgtctgacagggcgtgtagagtccatatcaagatgagcgagaatataagtcttgaagtcgcagaatatgttgaggatcaagacttgggaatttcagattcttgaccaaagatgagagttggtaggagatacgaagtagaacggcaaactccttcatggttggttaagcagagtaagagggagttgagctcctctcccctaaccgcctcctatgcttctcctacctcctttttgtttgacgcctgtatttggatcttgctttattgctggtaaaacgaaagaaaggtctgggataaggctacaatcgttgtttgatttaggggactttacttcacgctatttccaagtctatattgttatttactggcgccagctcatcgacgtcctagtcttcagtcaaatcattgaatcagaagcgtgtctaccccctattcaccagaaaagctcaagacgcagtcatgtacatgattactagctatgcgtgtgcataaattactcgtcaagtagttcagactcactcggtacttagtagttcacagaaaagcaccgtgaaagggtatcatgatcattccattcgaacaagatctgagtgctaaaaaaccgaatataacgcctcaaacatgtaggcgtccttgtcctgaacgccttttttccgatcaaatattcggagtctcactgctgaccataagggtcaagggttggggaaaccgcctctagtttccacgcagaactccagcgatgcgtaatgctaggtccaacatggagagatgctcgtcggatccatcaaccagtcgcttgtcgacctctgagaagagcatgacaatcttgtttttctgaatatcgggaattgcctcgttgaacactacacggcggtataactagaaaggtcagcaaaggtatggggaacacccaggaagaagacaaacctgtccaaccagctgcgtagcactccagccatcagccacaatatccgtaatcacccccgagacagcctcgtaggccgacgcaccactcgtaggctgcatagcctcgacaagagaatccaaaacatcatccggcagcaccccggcgatttcctcaatgctgttaaccgtaataacactagaattactacccacatccgtcatctccgcatcatcatcggcatccttcacagcaggcggcttcgtaggaccgaccaagcgcgccgcgctctgcagatacgtgatggcacgacgcaaatcaccctcgccacaccggataagcgtatcaacaactccatcctcaagctgcaagccctcctgctctgcgatattcgagatccgctcaccagcagcgctattatccagcatcttgaaccggaacttgctgcaacgactggcgagcggctcgatgatgcgcgtgacgtagttgcagacaagacagaaacgtgtgatccgactgtatgtctccatcgtgcggcgcaaagcggactgtgcgtcttgcgtcatgctgtctgcctcgtcgaggatgatgatcttgaatggtggacatgggtactgtgcgcggtaggcggcgtccaggcctgttggttgggagagctgggctcgcgcgaaattcttcactttgtcacggacgatgccgataccgcgctcgtcggaggcgttgagttcgaggattcgggagcggtaaagggcgggcccgaagagggatttggcgagggcgaggattgtggatgtttttcctgtgccggggggtccgtagaagagcatatgggggagctgcgagtgttattttattgcttcaattgttcggggcgggtggtttacgtttgaagcttgcagagtgcgccgcaagactttggtcgtgtggtcttgcgcagcaacatcatccagggtcttggggcgactaattgatattagccaatgctgggtaagctggaatagagcattgacttactatttctcaacccacggctggagtttagttgagtcttccttgttgtcgccagccttgagcttagagctgctggatgctgcggcggcagcggcacgagccttattattgaaaaaagaggcagccattgttgttgaatagccgaaattaacaaggcaggttatctcgagagctgctctgcgatgtgttggagtctttctgacgccctccacaatcaagacgcgtctccacgtgacacgcgcagcacttaaacactagccaatgagagcagctcactgtctgagtatacttcaacctatcgccagcgttaatgctggtcttatagactacggggatcaacattgcgagggtcatgattgcatggtatctcattaatgcttgtatcaatatttatagcttatagctcgtctcgcaccggctcctccatcccagcctcgaacatcctcttttttgtattccggggaagctttgcttgtcttgccctctcctccggggtgacgtcgtcaatgtctacgcttttttgtctctcttgctcgaccatatcgccaattttatcaattacacgattgctgtcgatgggtgcggtcggctcttgctcccaggcggtgctactggctgtcacggttcctgttgtagccgccgtggccatttgatggatagccgtagagacgtcccttgagatggattgagaagcagactgcacagctgtagtggatagcccggctgcacctgttgcaaacgcaagccgagcaaagagcttcaaaggctgccatacgagccaccaaagaggcccataaaagacacgtcggaataggagccagccaattgtcgcaagaaggatatagaaagcagtctcaaggtaccatgtgtcggacttttgggaacggagaagagagttcgctagactgcgagttgaagagagaagtgtatcaaggctgctataggactcagacagagaggagatcgcggctgtggattgttctgattaagaatattagcgtctggtaggataaggaaatggatagatgtacttaccaagagttgattgggcaaaatggctacgggagagctccgcctgcatgagttgatgggttctgcgtagcgcagatgtcacatcgttcgaggcgttcaaaacaagatcatcctgggtgaacttctctgacggcttcttcttttcggaagagtacgatctcgacagcagcaaatctctctccttccgcctggcgagttcggcattccgcttcgcttgtaattgggcggttcggaaatcacctcgtgttctgaagggccgattagcacatgctacatatttcaagactagccagtggactatgacaaggaatctcgccggcatgcgcagtcgttgaagggtatcttacctcttgagatcctcagccaatcgccctgccatagaaacaacccgctctttctcaacctccttctgtccatgcacagcagatgacttgcgcctgctatctgagccagtttccagcgcttcaacctccacacgcagcagctccaactcttgttcggcttccttcagccgagaatgtatctcacccccaagctccagacgtgcttcatctccctgtccaatagaagcagtaaaatcgcgcagtcgatccacgaggggctggatttgtcctagggaagccgagagctctttcacgcggccctggagagctgtcgtggaggacatgttgttatagacgcatccaagtgctgtttgttcggggagtagaaggggtgtctctgaaaatagacacaagtgtagaataaaccgagagattcaaaacaataagttgcttcataagtgtcgagttgttcaactcaagagttgccagcgtcattaggcgttgtgtttgcatccgagtcaaacatgccccatttcctccaaccgcaattcgcaacggcctccgatgtggtgagaacttccaattgaccttgcgccattacctatcagacttgtcgcagaccgactagggtccaagcaattttctccttggatcaatcttccaccgagggtcatttgtccaactgctgcgtaatctactgcagaaacaccacctttaaaaaacttcccgccaaccctcatccactcaggtacgcaacaacggaaccaagacggagctataggatatcattcgctcttgaaagattcaaactgatcaatttaccagtccacaaaagtctctctcccactcaccactcaaccgcaacaatgggcatccccatcgccacgataaccaccttccggaccgcctacaaccccttctcccgcgctgcccggccatgccgcctcttcctaggcatgctgcgcacaccagacactatcccaaccagcagcccgacgcacattgatatcaaggtcaagcaattgccgcgcaactccaccgagtcaccgaccatgactatcgggttcaagggcggcaaggaacttacgctggatgtcggaaagcgcgggctgaagattggcgatgttattgaggaggtgtctcgtgttggccgagctctgcagcgtgaggccagcttgaagaactaagagattttgttgttcgagcttgtattcgtgtattatattacctatcattttcatctaacgattttggcgctgttggcgctgttgggcatgtggaatacttgaattattgttggtaaaaaccataagatgttcatgcttctacctgatactaggattactggagtggatttgatcttgcacaaactgatcctgaaagtgattgtttcattgctatccagttgaatttgcatttgcccagagattactcttctctacactgtagtaagaatttgaatactgagagcgattcattgacagttcagaaatgggtcttttcctcggaaaatcgaagaatgcacttcccatcaggcgtaagatcataggcttggaagttttgtgttagttttataggtctctttcagagaatatcatttatactgcggcacctgagatgaagaaccacttgtcaatgcttccatcaatgggagcaggggggaggttctcgttgcgggggatggcagcgagctgggcctggtcaacacggtcgggagagttctcgacggtggtgttggcactgtgcaggttagcttcaaatcctcaaaataggatacatgcatgtagaactcacaggctgatatcgccacggggggtcttgccagtgacaagcttctcccaggcatcggagcactcgcggatgacatcctcggcgtacttcttgttcttgcactcgccggagaaggcgaactggttctcgggctttccgtcggggatcttgtaaatgcggaaccactcgttggtggcgcgcatgagaccaggaagctggcgctcgacatcctcgatgtcgttgagcttgggagcaagagggtcgttgacgtcgatgacaatgatcttccagtcggtctcctcctcgtcaatcagggccatgacgccgagaaccttgacctgcttgacctggccggtgtagccgacaagctcaccaatctcgcaaacgtcgaggggatcgttgtcacccttggccttggtctcggggtggatggagttggggtcctcccaagtctggtagataacgtcagttttctgcccctcttcttacccacgggtgtgggaggaaggttcgaagcttacgcgagggaaggcaccgtagttccagaggtaacccttgtgagggaagcagttgcggacgaagcggagcttgcccttcttggtgtcctgcttgatggggttgaggaaatcatccttggagatctgtgttgatgcgatcagtataaagctgaggtcaattgcgggactgtgtgtcgtacctcctgcttggcgttggtccagcgggggatctcaacgaccatgttcaggatggtttgctgctcgttggcgtagagaggaatgtcgtggaagggagaaacggggacgccatccttctcaacgaacacgcggtgctcgagagtgtatggggtaccgatcttgcggatggagtaagtcatgttgggcgaggtagacgaaatgtgtcgagatacttgtgccacacgggataagggagaagaaaaggaagaggaagagagaggggcagcagaagtggggggagccagcgctgctgatgtgcgccaaacacggcgggaggcggtggaggtggcacttcccagtcgggccaagggaggacaagtcattggctgtgttggaaagctctggatgccgtgtttgtttgatttagtatttcagatacagaacttgaaattgaatgttataatctcaatcaaagggtatagctgcaatgcgtggcggtgttaccccttgtcggaggtttgtatggggaaaaattaaacatggcagttccgaaactcggcttcttgtggtcaccccgactttgatatcccgactggaccaggccaatgtggatgtctattgtatacaattgactctatgcggtgagacgtacatagcatacatgtacgctatatcttttagctatttgacagatgtatgttgtacaccgcatgtacatacccgaccccatactatgacgccgatatcggcagtatacgtacgcctatgttgtctagatcaatcgcttattcagtccaattgtattccttcaactgtagaatattaacaatagaggcatcttgggatcacaaccttggaagtcatgtcgtgatccttggctgggaacagagcccaatgattggctgctttagctcagcttgaaaaataccagaataaagtaaattacatcaatacgtgaaatccaatgacaaccctcatttaaaaaacagttatcgccactatcttcacgtgactcgagctttccatcgcgagtcaccccaggaaaaaaaaagccgctctatactccgctctccccgcacacagcatatgggaatgctatgatcggaattttccgcaaaacaatgacaactctcgcaaccgcagctacaaccgcccccgcgtcggccgttgtgccgcgcgtgtccatccctaccaacggcgtcgactaccgcaacaaaatcgtcctcgctccaatggtccgctcaggcgaactaccctcacgcctcctagcactgaaatacggcgccgacctcgtctggggcccggaaacaatcgaccgcgcgatgattggcgccgagcgacgtgtgaacccacgaaacggcaccatcgaattcacccgcatgcccagcaacggcggccgccctaacaaatcactcaaagaatcagtcatctaccgcattgacccggcgcgcgaaaagggacgactagtctaccaaatcggcacggccagcccggagctagcagtgcaggcggcgcgcgtcgtggccgccgacgtctcaggcatcgacgtcaactccggctgcccgaaacccttctccacgagcggcggcatgggcgccgccctcctccgcaccccagacctgctcgtctcgatcctggaggccctcgtcaaggaagtcgggacacccttccaaatcggcatctcggtcaagatccgcatcctctccaagcccgaagaaacagaagccctcgtctcgcgcctcgtcaaaacaggcatcacgggcttgacggtgcactgtcgcacgactcccatgcgaccgcgcgaacgcgcaatccgtgaccaactccccatggtagcgaggatctgccacgacgccggtgtggcgtgcgtgatgaacggcgacgtgacgtcgcgcgaccagggcctcgcgctgatggccgagtacggcgttgacggtgcgatgatcgcgacctccgcagagaccaacgcctcttgtttccggactaacgaggatggcggcgtcgcgccgtggcgggacgttgtctacgagtacatgcgcttctgtatggagtcggagaatcggctgggaaataccaagtacttgcttaacatgctgattcccggaaaagacaaagagttcaaggatgcgaaactgtcaaagacgtatcttgatatctgccgcgcgttgaaattcgaggatttgcttcctgctgctatgcgtgttgatgagctactcggtctcgatgagaaatgggaggctgcccccgatacagaatcccaggcggagcctaaatcaaaggctgtgcagaatgccaaggtgtcggaggctgctcgtgcagctggcggcggtgctgttcggactaagactccctcgccggctgttcatgcgggtggtcctatccggcggtcttctgctcctcagccgactaaggttgttcaggttgatgctgagcagccagctgttgaggctgctattaccgctgcacagactcaggctccgtctcaggtgacggcgtaaatgatgcttgcgttttctgtccattgtcacttctcttcacatcttgtcttcggtcccatgcatagccttcggttttctctcagttcattcttccttttatcttgcttttatctgcattctgaggtgtttatgattgctttcatctgttctctctatagattattccccacttatatacaccatgctccttgatgactatctagtccttattacaatacatatcactctacgcttaacagagcttataacatcgtgtactaaatcaatggtagttggattcgatcctctaatctaacaaatgatcccccccaaacaccagtattatgcattctctgcatcgccatgcagatactcacaatagaaactccagtgtaccctttttttgttttttttgttttttgttttcttgttttctcttctctttgcgctcgctcacttctctgcagctgccgctgcttccgccgctgcctccgcctccagctcggcaatcatcatttcctcgacggccttcatgccgacctcctcactcttcttggccccggcctcgtcatctccagccacggcctggtcaagtgccagcttggtctggcccagtgcgtggatctgctcctcgatggtgctcttggtcaccagacggtagatctcgacctcgcgggtctggcccacgcggtgcgcacggttctcagcctgcacatcttcctgtgggttgaaggaagaatcgaagatgaccacgcggttggcacaggccaagttgataccggcaccaccagccttggtggacaggaggaagacggggatctcggtgcgctcgtggaaggcgtcgaggatggactggcggtcctccacgttggtgcggccatccaggcggacgaactcgattttcagggtttccaggacgtgctcgaggatgtccatcaccatcgtgaattgagagaagatgagggtgcgatcgccattggcgatgaaacgggtgagaagctctttgaggtgctccaccttaccggagtccatccattcatcgttcttgagcttgaacttgccgagggaattggggttctccacacacatgtggtggcactcgaagtcgttgtatggcatgagctcctcgtagatgatgttagggtcggatagcgaccacttgtcttccttcaggcaggccttggccatcttctgtagaatctcgttggtgtagtgacgacgagcaagaagggggtgaatagcggcctggcgcagcttcatgagaatgttggcggacttcgacccagtcttctttccagcaagacggtctgccacgagctggcgcacttctgccttttcgtgatcgtaaatcttgacctgagaaggtttcatttggcaccaaccaacatgggagtgcttggctggaagatcaatgacctggtgcttctttcgtcggaggataaagggcttcatcatggactttgcgcgctcaatgcgctgctgggataggagagtagcgtgggactcgtcggtggtcttggccttgttggaaaagactgcatgaaggtcatccttgtgctcgcggaagaccgagggaagaataaagccgagaagagatgccagctcctgcaagttattctggagaggagtaccagtgagaagcagacggaaacgtgcccgaattcgaatcaacttttcgtacagctgagattgatggttcttcagcatgtgaccttcatcgtagacacagacagtgaaatccatatcacgtaagaacttagcatcaagctttgccttggcaatggtgtaggtagtgatcacaacgttgatctcgtcacgtcgttcctcgatctcctcgcggatgagagcacgctcattgagaccggcgtagtaaggcatgacgttcaagaccggacagaatttctggaactcgcgaagccaattctcaatggtggaagatggaacaacaatcaggtgagggcccttaatgcccttctcatacagatgcgcgaggaatccaatgacctggcaggtcttacccaggcccatgtcatcagccaggatgcagctgaggttcttttcaaacaacaatgccagccagttgacccccaccacttggtaatccttcatcaccaggtcgtcggccatgatagaaggctgtgagataaaacgagatttgcgctttgaaacgaccagtttgccgctttcttcgtcactttcggaggattgacgttcagttgtaggagttgcaataccagagtcatgttctgatttggcaggagcaaggttggtaatttccaagtcgccctttttcccgaaggtgtcgacaccccatttcttcatctcttcggcgactggtttgccgagctcctcaacctcgccaacaagagcgtcaatggccagatagccagtccacatatcaatacacttgtcgacaatcttgtctccgatgggcttaggggccttgcctcctctcttgcccttgggcttcacggcttgtgcgactggagcagagacaacacgaacttcatcgagagtctcgtatggacggttcgaaatgatgatttctgcggttgcttcggggatagaggcaatatcagcgagatcctgaacacgacatgtgttgaagaatttcaggaccttggaatccaaaccgccagcggtggattcttggacctgaacgtttgaatcatccgaatcactcatcatagcctcgggggactcggatcggtcgggggaaggagctttgcggcccttctgaaggcgtcccaacttctttttcgggggactgtcatccttgattgtgatagcacgggaaggagaaatagcacgggaaccatcagacttgggtccacgaacgagtcggcgacgaggctttccttcgtcatcggattcctgacccttgggctgcttcattgctgcccacttgtcctggatggtgccacgggctttgatgttctgcttggccatgggaacggggcctgtagcgggggaggcactcaattcatcatcggaggatgcaatcaccacaggaccattttcagaatccatcttggcaaggatctggagcgcgccgtcgtagtttccctttgctttcaacatcgcatccatacaggctagaacagtcatatgcggcataactttgagaatacgctcaactttaacacggagtctgaagtcgttgatttcgtgaagggggatgtctggaactcctgaaggtggcgcgcgagagggcgcatcctggcgggctttcttcgtggcaactcccttgggtgccggcggactcatctgatctgcagtccgcttggtggcggttccagcgttttttggatcgtacatggcagaggcagtaatttctcggaaccgatccattgacccagcatcagggcgcacgggcgactccatgatcttttctttttcagaatcccgagggggcttcgcaaacatggacggttttatgtcgggactttgtagatgacactcttcgtctgaagagccacctcgatatgtcgggccgtcgtcgagatcaaaccgcggtgttcgtttggtaggaccagaggcaggagggcgaaattgcgtcccagaaggagcgatcaaggatgagagtagaccgccttggactcggcggggaggagaaaaggcagggcctagcggtgaagatgcagcaacttgaatgacagtattgttatgtcttgagtagggatgttcaagtagttgtgttggttgggtcaatctttgcgatggggttgtcgctgggagagttgcgatagtttcgtagtcttcgccgggaggggtactcgggatggtttttatatctcgagggggggtactattgatagcttcttccattgctctcaatacaacaatgtcattgaatcatcgactcatctaattgttcagcgctattcaggaacgttttttctgccaaagcggacacgcgccaccggacgcgcccaatcacgtgtgagagccgtcaattaagctgtgaatgagaacaaagaggtgagacatcttgagcagttaagccacatagagacgactaaatcagactcagttctcaacttgaatgaacaatgaaccgcagggaacagaatcggaatgagacaatgagacaataaggagtcacatggcatatacctcaacccaccaatcaaatgccatatgacggcgggcactaaccttctctccgcacttgcgatagcttcagctcctttgtctctctgaccttccctttttcatctttgcctttgactcacttggatattgttgctctcaagaaacaaggatgtcttcccgacgccccgacaaccagtcctacgccgatgttgcggcgaagcctgaaccgcaaggcacttccgacgtggccccagctgttcctgcgtaagataatgaccttagaagcttagattgattcttgaagacatattcttattagctctggtatttagagatgtgatctacaagctcctcggctttacagctgccatgatcgttggccctattggcatgtatttcttgactgtgaattcaatcttcagtggtgagtatttctgcttccgacttgcaatggcatatgctgattgaatcgatgttattcagggagctcgacacttgctggaatcaccgccgccgttaccgccaacgcggtcctgttcacatatatctatgtcgcctggacggaagaccaggaggatagacaagcagccagcaagccagattcaaagaaagcccagtaggttggataaaccggatctgaagaaaatcattacttttcggcgttacggcattgttcaggtggttggggtttctgttatgtataattgggatggaacaacttcggccatctaaggactcaattgtaaaactatacattgactgagctattcattttactgttatatatcccggatatcccaagataccaagccccatacttcgatgtcaagccattaaaaagcgctgttcatgttgaaagaaccgcatctagagacgagaaagacctcgacccatgctccagtatagacagatacgccgatatgcattgcaacagaaatcactcccacatattcccattctcggctccacatccgcttaggtaggtctgcgcttgacaaactcctccaagtccgccttggtagcaacacccagcacaaacttgcgcgcctcatcagtgaccacagcaaactgctgcttctcgcgcttctcgccattcggccccgtctcgctctcgaagaagttctcgagctcctcgagcggcgtgttcatcgtgatgacctggtagagaccgcgtttgcggttgaaccgctgcattgccgcggagacggggtcgctttctttcacggtgccgctctgcagtagctcacgtagccgtgggatgctgaggtagcctagcagggagcgctttgtcggggagataacggtgaggtgcgtgtagtcgcgctcgtaggcggccattagggctgtggagattgggtcttcggaggagattgagagcgccgcgggagggtcgaggtcttcgattgttgcctgttttttgttagtttgggccagatggttggattgggggagacggacaccgcggtacttgtcggcccaggctgctgtagatgtatttgtgtcggagggggtttgcttctcgcgagtgaaggcctcgctggcggtcgagtatgaagccattttgagtttgatcgggatgaggggttggtgaggggcagtggataagttggagagttggagggttgttaagaagaagtacaggtagctggaaagtggagaataattgtccaggtgtaaatattgagaagtcaagtcagggttctcagtaggtatacctaaatcgtgcaggtcaagagcttgcaaccttggggatgactttttgatgtcaagcttggcattaactccactacggaagacgcttgcggccacggaggctatcagatctatatttctattttctctctgcttgcttttaattgcaaagttagccctagagtgtacttcgatgatcagaagggcataaagaaaagtaggaaattacggactaaagacggcctctggtcggtataacatcacccactatatatgaagtatgtccagaccataggcaattaaacatagcatcaggaaatgttataatagatgccccgatctagaatgatagaatctactttgcggaatatattcccataagtatatatacaaacggggttctctcttggcctaggattgtaatcctggccaggggcatggcatgtatacatgttgtagcatgtcaaaaggcacagactacacggagatagctataagtacattcaacctcagatagctgttatttaaagcgtaagaattaatttccccagagtacatatcaagactgaagtcatactcctcacaagtccggagtaccccgtatccttgtaccccgctagcgccacttacaacctccgcacgtcattgtcttgggatcttgatttcccacctcatctcaattatattcaaaatctcatacagattcaacaggaagaaacacatcagtacactcaaaacccaccctttggtggagatcaccggatatcaagccgactccacttatacccactacccgaagtacaccatgcttccggactggatcaacgctttcgccgcccagcatcctctgggtgccgtgagcgatgcgaagtccgcgaaaaatagaccgtttacagcttggagtgcactcgacgacgtgaagaccaaggccgacggcattgccaacgaggcgagccgggaattcaatgtcgcaagccagaaggctcagcagaagaccggcaagatccagcctggctctctgaagtactatgtagcgtgcacatttggtggaatgatggcatgtgtcagtagcttctctgtctgaattatgatcgccagatactcacgcatatcagggccttacccacactgccgtgacacccctcgacctgattaaatgtcgccgccaggtcgatcccaagctctataagagcaacctacaagcgttccacactatacgtgcggctgaaggtattcgcggtgtctttacgggctggagccctacgttcttcggctacagtgtaagcctggataacctgtgggtcttttaccttaattatctatactgatggtatacaggcccaaggagctttcaagtatggaggatacgagtacttcaaggtgttctacagcgacctggtcggccaggagaacgcgaaccggtttaagactgccatctacctgacagccagtgcctcggcagagttcatcgcagatctagcgctgtgtccgttcgagtctgtcaaggtgcgtggtcagactaccattccgcctgagattacaggtactttcagtggtatctcgagtgttgttgccaaggagggcgttgctgggtgagttgacatatatccttttgttctggatcgaatctatatactgaccctaccagtctgtacaaaggtctttacccgctgtggggccgtcaagtcccctacacgatgatgaagtttgcttccttcgagacgatcgttgagatgatctaccacaatctgccaggccagaagtccgactacaacaagggtgcacagactgccgttgcattcaccggcggttacctcgctggtatcctgtgtgctgcggtatcgcaccctgcggatgtcatggtcagcaagttgaacgcgaatcgactggcgggtgaggcattcggcgctgctatgagccgtatctatggtgatattggcttccggggattgtggaacggactgcctgttcgtattgtaatgattggtactttggtgagttgttcatgttcagtgtggtcaagctggtgctaatatattcgtatagaccggactccaatggatgatgtatggtctcgctttctttcgtttgtgtggatatatactgaccctgattctacagctacgattcattcaagattttcatgggacttcctaccaccggtggctcaagtgaagacaaaaagaagtaaggtgtctggtttgattcgggtagtggtatgcacagctcctttatcctttaccatctcggcggctcctgcgatattctatcaagtaatacatactctctctagttatcatcgtaatataaagtaaccgccaagctcgctatcggccaattacagtttgtcagtggccgcctctaccaatcggaggccgatatcttatcgtccctgcagttgtcgaatataaaatgtcaatgtcgttgaataacatccgaatgacatccaacttagataactagacaagcgaaataggggacctcgggaaccgcttggctcatttcacgacgaaccacctctattggctgcgaatccctgtattatctacccgatagctaccatccaggtggattatacttaaaaagatctagatccccccgaaatccacttctctacattccccgtacgacttaagaaacagtaagttcacgtggatttccccgccatcgcatctgtacctgcatgtatcgccccatcgataaatatcttccctgccccaccattcttcctttcgcatctaccaccccgcctctacttgcaacgacacatctacgaacctgaacatctatctctgacagaaactagacaagatgcccgataagacagaggccgaggcatccacatccgacgcaccgatcgtctctcacggccgaggaggcaagcacccaagtctatgcgtcatcgcgcccaccaactaacaagctcgaatattaggtcaaggcaacatcggcaaggataacactgagtatgtcccatcgcagtcgcagtcgcaacaagcgacaaatactaaatatcgaatagatacgtcgatggcgagatcgtccgcgaaggaaactacggcgaccaaggtgatggcgcttactctgccggcgtgagtacttacctacctaccttcctacctacctacctacatctatactttgaacacccaaatccatcttttagcgatgtccatactgatacaactccagcgaggcggcgctggaaatatcggctccccgatgatgcgccccacgtccaaggttccccacgacaccgagatgatccccgagcttgcggtccgccactccacagacgaaactttccatatcggggtaagcagagagttgtttgctttgctttgcgtttgatttgatttatgattgattatcccgggcttatggtttccctttccgaatgcggttgtttttactttctttttttcccttcctgcttttggatttcaggctgactttttcgtagcgtggtggacagggaaatgttcattccgaggatgcgacgaagggcaagaagaaggttgccaatgagggattggcggataagttgaagaataagttgctaggacggaagtagggtagggccttttcatcttgtgcttcttttgtgattcccaattctcgcggtatcaattaatttccgggttcattccggatttactctttctctaccatgttatatgtagataccaatctcgaacagtaagattgacggatatcatgggagatagctatgtggagtagatacagatcaatatgaataagaaattaaaaacgaaaacaaaataatcaaagaaacaaaataagtgccaaatccatgacgtgtcccatgtgtccatgcatcataacctcattagagcatgcgatgaaagaagtgaagaagcaaaaaaaagaagtaataaacacaacccacatccataaacaaatagaaacgccagtctgcagattcccaaacaaaaggagaaaagaaaatgaagtgtccagatatatcaatctcacatggacattctttatttatccttgctgaaccggcgtttgaaccagctctttcttttatccgctttctcacccttcttgctgacagtcgattgtgtggtggagatcgggacacctccaacgggtccgcccatggtcgggtcgcggatgggctggacagggggtgccttggagttgaacccgttgaacccgtactcggcttgggaccgctcgtccagacgctgttgctgcagagcctgctgctgcaattggtcgttggagctgttgatcgagctggggtcggtggactggccgtagtctgtggtgccggaattgttcgacatggccgcgatgttgtcgcgcgaccgttggtagccgtattgcgagccggcgatgttggggtagccctcggaggggctgatgggcgacgagggtgacccgcggggatggtgcgagggacgtcttctgccgttttggctatatccgttctgattatatccctggttataggggacagaaccctcgggtgagagaggcgtgttttggtacgcgttcacgatgctgtctggtcgcgattggccgtagtagctgttggatggaccatttggacctgggaaggttagaagggatcgaagatgggattgaagatgggagagatagcatacttccgtagtagctggtccgtcggctgaagtcgcccatttgtgacgcatcctctatcgaataatcagcctacattcattgtgactttccacagtgccaatacctgttctagcatatgacgcacggttattgatacttgtgccgtagatagcagcctcaaacgatcgaatggtatccaaggggcgttccagacgcggccgagtgggatttgacaggtcgggatcggctgaacgaagtaaggagttaggagacagtcccagggaggaaagattgccagtgatacggactgataacattgccatattgatccttgaattcaagctcgcgcagtgagcccagattggacttttgcaaggccacggccactattgtggtgtcagttgaagtaaaatgggacatgggaaatgcgaggtgcgaggtgcgaggtgcgaggaaatgcgaccgggccaacaaggtggtaaacatactaggctgaagctcgttcatggcgataagtggatctgctttggtatgtagattgcgacgagatttctcttctgaagactccgagggaccacgtttatggcttgttgatccggacttgtctgacttgtcggatttcacactgaacccacgactcctctggggagtgggagattggggggagtccattttattaggggcagttcggtctttcttagcgtccgcgattcaaggaatgtctgaaacggttgtgatctaccaccgagagtggagcgtgggaactgccaagaatatcacgattcagctgtagattgaatgacggtgaggctggtcactagctgaaacgatcgacacgatgggatgagtggtgaaggagcagactgggagattggattgtgcgtgtgattgcggtgattggtgatttcggtgtttgtgatgatttcggtggtcttagtgattctagtagcccaagtgatatggggtgtgaactgtcaaaagagtggagcaaatgaattacacgagttcaagagtacaggggacagagaagcagcgagagtagagtgaaactgtagaattgcagagaaaaaaaagcgaagatatttccaaagttttccaaagaggcgaaagggaaatggacggtttttatcggtggaccacgcaatcccaaggtctactggtacttttcgagtgggttttcgtttttttatgcataagcaggttattgcggttttattttagtttattcagtgggtagatctagaatactgagaagactgagttggctatatgatagtggcatacatagtacttattagctgtcttatacaacatacacatcctattgactatgatccaagacataatataatacgtgcaacactccaatataatccccagactccataaaatacatacttaggcttcctccataccaagaccagcccaagaccttcataaaaagtctcaccttttgtatttgactttctctttggctttcattccctttattccccttcttccctttctccagcctttctagaaactcataccgcgtggtacatccgggctattccaattggtctgctcttagaatgcagtatgctgtccttgtatgcattccttatgaacaccctccgttgtgcaaaccttagatttgagcgaatgctaatgaatgcctacaatgaatgcccgagtataaaacctgaaacctcacctgttcaccaacctcgggtctgaatttctagatcggaggcctatttttaggaaacccacacgggccaacggtccgtggtttcttactcgacgcgcaagacgatcccgaggcactccaggctgacatgagtcacattctgaagtgatagaccgttgagttataaataaaaagcagagatttccacgtcaagggtttcaatatgaggctggggtaagtcaaggtcacggtctcggtcacggattatgcacagccacggcataaatatcggcacgggattaatgcatccatcacttctactaaacaatcaccattcctgattctgcacaataacagaaggaccaacatattccttccggcccttgacaacatacatcccaaggctgacgataaaaaccccaacaaagataaccacactccaattaaagttctccagagtgacgtcggcatccccgggccacaacgaccagaagaacgcgaaacagcagtaaaacagcccaataatattaaccgccagtccccaccgtcccatatcccaccgacgcggcggcagggtatcaggataccagatcttgcggtagatcacgcagctaatcgatgtaatatacgtgtacatcagcgccgccacgttgagcgagataatagcgttgaacgcagtctcggagccgatattgataagcgataacgcgcagctgatgacgcaggacagcgcgatggcattcacagggatctgccgctgggcatccactttgccgatccatttcgcgaatgggaggccctggtcgcgggcaaaggcgaaggtctgtcgggaggtggaggcgttgaagaggatgttgctgaagatcacggggaggatgataatcgccgtgagtccattggttccggcgatagacgttgccttctggaagacatacaggaatgggaatcccgtggcgtcgtttaacgagtcttcgaccgacggcgtggcgaagagataggtgatgatcatgacgatcgccatgaggccgttactaaagtagccccaggccatggcgatcggcacgtatcgagcggcgtctttgacctcttcggacatgtgggccgttgcgtcggagcctattttgacttagtatcaggttggagtctgggctacgggcttgcagacatactcagagagccgtagatagctgagatctgtcccaccatcacgctcagtcccatcgtagaccaaccgccgtaattcttccactgcgtcacgaacaccgcttcggcggattggtgcggagccatcacccacaggacgattataataaccgcccacgatacaacgtggagaatcatcagtagattgttcagtacgggcatcacgtcagatccgtacacattgacgatataaatcaccaataccatcgcaaagacgaagagcgtgccctgccaaccctgcggatcgtaatccgggttccgcacgctgatcagtccctggatgatagttccagtaaggaatgagccggaggctgcgccagcttgccatgctaataccgacatccagcctataaacaatagcactagtcagaaaaacaacatccaactagagcaaacaaacagaccggtaatataactcaggaacttctggtatcgaggcgaagaccactccgaaacccagtgatactgcccgccagaagttggagccatagatgccatttcagagatcgaggcgatgatgaatccgaatccaatgaatgtccatagataggagtagaagaggcctggtaagcctccgttatacaagccttcgtaattagagctgaatacagcaggaatcagagatgtaaatagacataatcttgtagtatgatattcatactcacataagaataaactcccacgtcgcttgcaaaaccgacgcaaaactcaaagctgccacaggtcgcatgtttctcttgataatgtcagacatatatcaacgccgtgaaacgtatacataccttgaactcctgcgcctttcccatccgctgcatgtcaatgtcgtcgacacctgcgcctgcctttaagtcatgctctgaaaaagcatcgcgctctacagcttgcacctcctggtcctgcatttctagcccaggtgctttggtcatggcgatggataacctaaccagcgattgagcgggggagaaatagaaataaatagggtaaaatctaaaatctaggggaactagaacaaataactaactaccaaggcatatatcccacattccccgaataaaagtacggagtattggccgacatccagacgcctgcagggcttatcgtgaggctagtctctagggcttcgtgcggagtggatcctttggctgcaactggcccgtctgggtgctccgactgttgttgattctttgttcacatatgtaggaatgatatttgcttttattgaatacgagaaatgctctcaattttccgtaacgaaaaaagaccgtggatctcggtatctagtgcaaggggagggtgtacaatgtagggctgtagggaaagtgcatcgacctcccttgcgcgatgactatgtggggaatacgcgcgccgcagttaatttgtgcaaagtatatacatgtacataggtagtcatttctggcgaggatgataggatattactctcgcatggataagaagatgcgatagtctctagtctgctctttttccttcgggctagggcttacagctactaatatgagcacatcggagacattgagtttaagattgatacaacagggatagagctggtatacgtctaatttccatacgtgcatacaagctctatagccggatggatagcccctgtacaatatcagacccgtatgctgtacatatcaagcattacgggcgcataccctggtcacaccttaatgcagactgatattggtggcttttagattaaaagttaatttgaacttcgtattgaatggtcttacgtaggaaataataccgccatctagttagatcgattaatgcgtaggatatattccaatctattctacgtctcaatcgctctataattgctttgctaatcattatagaaatctggagaaattcaaataaagccgatcggctaggccgtcccagtttgtctggaaaggttcatatatttttatacataatgcatatgctcggcgttgagtaggagcatgaggggtatcttgtctatctattaaataaaaacgtgagttcccgggttgaatccggagaacatgcaaatcgaagaatcaaatgactcaattcgagcgacgcgcttaagcagttgcctcgtcggctattttggacgggacgtcctccacggtgacctgcacctcgtggctgtgttccaattccgacaggacaatccacgtgggaacgaacgcgataaccgtgattccaaagttgagaccgatgctgacgaagtggttggcgccgccttcggtctgcatggcccatgcgacggtctgtcccagagcctcgaatccacgcaggataccgcagtggtaggataacgatgagatgtcggtgctgtactggccgaccagccagtagaggaattgctggaaggcttggccgctgaaggtccagaagaagatcagcgcgtacgctttgttgaagcccggtgtgaaccagtcgaacaccggggactcgggtaggtcgtagaactgcttctgtaggatagtagcccagatccaggtgccgatgatcagggcaacgacggagcagaatgcaattctggcgcgggtcttgatgaagatggtctggcgatcaagcagcagcgccatgatgaacgaagacgcgattccggcgaagttggtgaggaaagatgagaatgcgcgagatcgcacggtgaagtaggtggtcagccaggtgctctggaagccgttgtagaagtaactgatgaagaaggctggcaggagaaggagcacacggcgagtgaagatcagagaaaaggcagccttgaattccttggcccaactctctttcatgttcacaaccacaagagagtggtccttgcgctgcaccttctcagcaggactgagtaggagcgaaatgggcaaaccgaggcacataatgacaatgaagacgatataagtcgaagcgctgatcgttccctttccggccgtctgtgcgtttagtcccagactgattgcaccaccgacgatcggaccagaagatttcgcagtctgccagacagcgatgtagaaagcgcgctccttgggactgggataaccaatgataatagcggcctcggcagcccagaaaaatcccgctgagataccgcacagggcggagccgaagagcatgaaccatgtcgtggtgtggtaggtgttggtgtacagaccggcaccatagatcgggtaaccgatcgcaccgagaactagaccgtagcgtagaccaatacggttgttgattgcaccagcggcgatacaaacaacggcaaataatccgtagaccaaagcgttcgccgcggaaacagcgtagggctcggctgcaccacctgctccgaggttgttcagtgcatcccacattccaggggcagtgaatgagacaccactagccacggcgatctggaaggggatagagcggtaccatgaagtccgagacctggtgatagtttgagagtcatcttggacttgctcagaaacgacttctgacgcgacaggaggggccattgtaaatgtatgccctctcaagagtctttttcttgtatacaatataacaataaagaaaaaagaacgaggacctggcgaggaagttatataaaaatttgaagaatcaaggtggatccgctatatgtcgtgcttgatgccaagatattccaaaacagcaaaagcagaatctttgacacatcgcaacgtcctgatcaccgggttttgactagcttcgggatttggacagcaaccctgtggagtggcgtgacaggttgtgcaatttccagctcagaggccattttcttgtattgcatataaggcagttccatcctcacacattggacaacaatcgctcttttcgcgcgtcgcgatttgccagaaaggcgatcaggccaacactcaggaattgtgcgacagtggtgaccaaattcgagatgaatcccgctcgaaagtctggggcagaaacagccggatactgaaatatctgtgtccatgctgccatggcctggccgattgcattcatgcttgccgtgacgatagcgcgttcttcggcatccttggccatggtgatagtcgcccaactcatactgagcggactaattgctgtggaagatttagtatcgtttttgatgctagaaataacagaccagagcctgtatctgaatccacataccgccctcgaatcccgtgaggataaaccccgccagtcgccccgtttcgccgacattatagacaacgagcaaaatcacaccaaccaggacgggaatgctggtcgccaccgaaggaatccaaaagtttcgcaggcgatcggcggtaacgcctgctactagtgcggctacgacagacaacgccgttgcgattgtcggcaatgtgttcacccgtgagacggagtagatgtctggtttggccttgagatataggctaaatggcgtcgaatatggcgtgaagttctggtccattaaagtccaatgcaggacaaagacataccaatgccatcgtccgaagactcgcttgaagatggcccgggagactttcagctcactcggcgctgttagacctttcagacgaatattggcaacatcgtgctcggtcgcagttaggaaccgtggctttgcgcggtgaggaacatctgggaaaacgatatatccactgatctgtgttagacgaacagtgaacagcctcggaatagggttcttacagaatgcaaataggaattgtgataatagtgcaaataatgaacagccatctgcaacgggtcagtatcaataacatcacatataattagagtcaaacctccacccaggcaatccatgcctcccctccaaattcgtataggcagcagcctgcaagtatcccgcgaacatagtcccgagtggagaagcgataaagaaaagcgcaacccgccgcgtcacctccccgggcttataccacgagccgatgacatagatgacgccggtgaaagagcaagactcgcagatcccgatgaagaagcgcattgcgtatatcgtttttagattctgcgcccacgcacagccgaatgtgaatagtccccatcctatttccagagtcggcaaggcaatgttgatctgcgtgcgcgttaggtagtagcaggccggtatcatggatgtgcaatacgaggcccagaataccgcggttatgtagttcaattcgttgccgtgcagattgaggtcttctttcatgcctctattaggtgttagtaaggggggtctgttacactgagggtgtgacatacgacacataggcgttggtgatcgcctgctggtcaaggtatttggtgaagaatgaaaggcagccgaagattagaatcatgatatccagtttgaggaccagttttttctccgggtgtggcatatcctttggataccacttggtatacgtaaggaaccggagccatagtccatcctgtagctctgtattgggttggaattcatggtcggatacctcatggatcgacttggtaccaattgcgcgtacgttctccatatttgagtatatttgagtcgtttgaacttcgtacgggatgtacagctggaagcaattatccaagctgaccctctgtggtcatttcggttgtgcaagcctcgataatggaagatgcgacgattatcacgcctgatggtgtcatctgtcatctccgctgcttcatactgcggagaaattgcgaatcgcggagactggccgagtctgatatgcatacctctcgttagtgacttgggaaattgaaactagcttatcttgaatgatcaaattcatcattaagaacgaaagattgtgatgttccagaggttgagggcccgggccctaagtatcgaatatagaatgaagatgaattcctgaactgctcagaactgacatgatgtgtaacgcttgatgtgtatcgatgtgaagtgaaaacccctaaaaaataaatgctcataatcatacaatgtacaccccttcctcaactcctaatgtcgatcttgtactcctcggcccagaatgtgacattgtggtccacagagtaggtttcggttccgaaactgagactgccaaggtagtcgtctttagccgggtaggtacttccttccaagttgtacagatcggtgatgagaggataaatgtctccagtaaacctctcaaggatcgtgtccgcgacccaggacaagactagctgtccattgtcattttgaccggtgtaaagcgtgctgatatcatgttagcgtatgatatatcaggtacagttcaactttcaactcacaatttcgttccttccaaggttctgttaatcactgggctcccccaaccatggggttgagctatctcgtttgacatccagaaccaaaccatgacctcgaatttcgcattagtttcgttcttggctttgtcggcatcggtatccaagaacatatcaatggcgacgttagtggcaagggtttcagctgccaacgcttctacatcggttgattcggcgatctcgtcacccactccatatgtccaatgcaggtcaagatataattcggagatcgtgtccatcgcttttggcaacacatcatcgacgcgaatattggggtatccgtggacaggcgcaatctctgggccagggtcgaattgccaggtgatggagaactcgggagcggtctgggttggataagtctcgttgacgaatgtcgtgacctagatcagatgatacattagtacgtccgctgtagaagtgcagatggatgttcgatgcgtacattcatgcagagcccgtttcctgttgatgttgatgtcacaccccattgatttgggttcactgtaatctctgtcagtcgtcgttcaagtcaacagcgcctgcgctggtaatccaagagcactaacgcgtgtattgttcggatttcgacggtggactgattccgattgaacgattgcagtactgggtgctcgacacgccattgttcgtgacagtgtgatggccaccaccgccgccgccagtactgtcgctgccagagttgccgccagagctgccgccgccagtgctgatgccatcgtcagtgtcccccccggtgaatagaggtttctgaccattcgctgctcggtgggcatcaatacccattagagctccaacgcatcccccaactgggatgcccaccaggaccgcattgaccagtagtcctaacgcgacgaccatgaccaaaaacgagagtggtataaagcaagaaactaagcgagagtgcaaatgataaaggaaaagcgagcagcaagtacggagtacagcgagttagcagctgaaattctcggcctcacatcggaagatgtgaacgggtggatggagatgcatccggttagtctgtctagggcgatcgagaactaagcgttgaccacacaaatcttgttgataagaaaagggccctgagtggggtaagtccaggtaagcgtggtaatgatgtgctcatgacttgtatattacggggggattcaggtacaatcaggacgatctggtacttcaggtacagcaggtacagtctggtacagcaggtacggaaccacatcatttaccgatggcacttttactgcatttgaatttatcattggttcagttcagtggcaaatttatagatgaaaacatggaaccatggctagaattgctaaaattaccgaaaaaagaaaatagattatttaaagacccactttgatgcaagcaaaaattaccacaaactcaaaccccgtatgtaagaacctaaagctcagtgaaacttacgttgaaaatttcaccagaatctatttttgcggctcgggcctaaagcggccatgcacctcggtccttggcatgcactagtcccagggcttaaccagctggtcccttagagatcgctggtttcgtattcttctttactaggaatgtgagactttttctcttccatccttccattccagctcttcgggctgatcacactcgttttcgacgtttctatcccttccaacgctttcaatatacattcttcgcctttttgactttacataatctatagcctttctgtcgaaatggacaggcgtggtggtcatgacgaggacgaaaaggtagaactgaatgcctatcctgccaaccattcaaaccacagcttcgaatctcagcctttttcaccctcaccagtaactccaaggcctctcactccagtcagaccgggtcatttccctaccgatgaatacgggcaacccgtttggcttcaacccaccgctcgaatgtcgggcaactccgattcctttcacaactcctcctgggacctacgaacgccgtatgattcccggtcggcttcacccactctagttagtacagtccgtctttgtttctttggtctctttgttgtcggtatagatccagcctaaccggtttcccatacagtatcaaaacaatggagtgcaagaaagccaccagagtctagctcccctagtgagctccccggctcccccgggatttgcaaaggattgggtcaagtctggatcgattgctcgaattaacgaccgtgatgatgcggatacatggaaagggtggaagagatgggtatttgccctggtaccgtttctcacattcgccaacaccggaatctacttgttctacctcgggctgagaattgcctgcattatcatggctcaaaatgtttctggagtttcatatgccggagcttgggtttttgtggctatcgagatcactgttgcaatcccctccctcatgcacaactgttggactatgatggcgttgaagaagagaggccgtgccaagctgagattgaccggcaatgactgtccgacagtggatgtgtttattacctgctgtggagaggatgatgaagtggtcctcgatactgtccgtggtgcgtgtgaccaggactaccctcccgaccagatgagggttatcatcttggacgacgccaagtctgccaccctcgaggctggctgcaaccaactcgctgtgaatcaccccaacatcatttacatggctcgtgaaaagatccccggaaaaccccaccacttcaaggcaggtaatctgaactacggtctggagcaggtcacccttttgcctggaggcgccggccagttcatggccgccctggacgctgatatggtaagttacaggtcccggcctacgttgaaattgaaattcctgtactgattgacaatctgcagattcctgaacaagagtggcttcgtgcgattcttccccacttgttggtggatcccaaaatggcccttgcatgcccgccgcagcttttctacaatacccctgcatccgacccgcttgcccagagtttggatttcttcgtgcatgttattgagccgatcaaggatgccctcggtgtggcttggtgcactggatctggttacgtcgttcgacgcgaggcgctcgaagagattggcaacttcccgctcggttccttggctgaagatgtcgcgacctccacactcatgcttggcaaaggatggaaaaccgcatacatccacgagccgcttcaatttggtaccgtgccggaagactttggtggacatctcaagcagcgtacgcgatgggcaattggaaccgtcgacaccgctgccaagctgaagttctgtctctggggtgacgccgttcgacagatgaccgctgctcaacgattctccggcttcctctatgcaactctcagtgtctataccctcctgctcaccgcttccctctttgctatcccgatcatcctcttgtggggcaagcgccttgtcgcctttgcgacagaagagcaactccgctggctgatctggtcctgcttcgccgccactatctccaaccgtctgtgcgaactggccctgttcatcccggcgggctataacaccggccagcgaggctcccgctatcaactttggatgtcaccctatatcgctctctgtattgtgcgcgccttcatcctccccacctggctgggcggtcaaacccaagccttcaagcccactggttcgctgggctcagctctgaacgagcgcgacccgaacaagtccaagaacatgttcgtccgcctgcgcgtgatcttactcaactacatggccagcttccaccttgcctttgtctacgtcaccctcatcggagtcgtcatctcctcttaccgctgtttcgcccagaacagtggcttccgagatatcatcctctgcctcatcacgcacgctttctggcctccactgaccttccttttcatttgcacttcgctgtggaccccggtctcgtatgcgatcgacccgccacgcatgccggagcgtgaagaactccttacacgtgaccctaagactggtgtggcgcacccgacgaagaagagtaaaaagatcgccttcggtggccaggccgcttggttcgagcttgaatacacggttgccaccgtggtcacgattttagtcttcatctactcgtttatgttctaattttaagatttcctagtttggaaatctgtctgcatagctaacgtgtcacatgcttcaatcccgatcctttatcttatatgtatctatctacacctggggaatggcgtttaagctttgtgtctttccggtgtacaactactctgcatattcgatcttcgttatacatgaatacatatgttgatcaactccaaaatgacttatcgccggggctgtgtagtactccatgcataaatagtcgatacgtacggagtacagccttctacatgcccctttcggccaatcacctccagattggtctaagcgctggatttaatttcggaccaacgcgggttggctatctgagactttgacttgccttcagccaaatgcgccaatccgcgatattaattaattctgcattgaggcctgatagcccatttgccgtgtcaacggttatttactccctgctttattgcttatctagtgctattgattgcccacgcgtcttgatctgccatttattggacttgttctttttatagtctgcgcgtcaccgctattctgctgacgttgcttagccagagcctgtgcagagagcgacataacgttgaaagcttgactcaaaagtgagacagataattatttggactttctcttcatttaatattaatatcgaaagatacaagggtttgttactagctcagacggtcgtcctgagacttggtctttattggccactgattctctcgccctgaaacaacttcttggcgaaagaatcctcatgaatcttttctctttctgaatcttcgtcaataattagccaggttccatcgaggaacctttgttgatcccacaatgaatcatcgatgatgttggttcgcttgcaagcctcgcaaaagccgaccttgaaggatcgtgacctgctagttctagttctagttctagtctggcggcaatgccggaatgagtcatacgtttaaatgtggccatcgccattggccaatgtggcaatgtccacagtcttctctcgtggctctcataccccagattccaactcatggacaaacacttccatttaaggtatgtctaaaccgccggcgttgatcggattaaccccgaaccgctgacgggtcgggactttatcagctgcccgtcttgccagtagtccaggactctttgtgatgggagacgcctttgataggcttcagccactcggtccggtttccaccccggtcacctgatcggtttttaggtatatctcccgcagggaatggctatctgaatacaatcagcctccagccatgtcaccgggctcggattcgaaggtcgagatccggttatgcggcggattggattggtccacgcttcggaatccatgagatagttgcgattgcgatggctatatagaagagcagacgtctccgtctttggatttagttatagcaacgcaatcacaacagttttactatccaactatcatctctttcgaattgtattcacaatgtccttcctaaggaactacttcggtacctccgctgtcccggcgaaggaagagaagaagcccatccgtgccttgcccgcctcctggtacacatcgccggagatgtacgagctcgaacgacgctccatcttctcccgaaagtggcttctcaccacacacaaacaccgagtccccaagaacggcgacagtatcacatatgacgccgcgggctacgagttcgtcgtcgccaaagacaacaacggtaacatcattgcataccacagcaacgacctcttccccgcgcatgtgcacatcgacctaaacggattcgtctgggtgaacctggacgccagcgaaacccccgaggtcgcctggaaagacgacttcgagggcgtcgacgagcagccccggttcaagcaatacaacttcgaggactactccttcgatcacacttgggatatggcgggcgatttcaactggaagatcctggcagacaactacaacgagtgctaccactgccaggtcgcgcaccccgacatccctaccatcgccgatctcaactcctactatgtcaagaccaaggacggccacatccagcactacggcgcccagcgacctgaccaggtggccaagggtttcaacattgcagttacctacttctggccgaacgcttctttcaatatctcgtgagtataggataatatccctatattataataaacactaacattaaactcctagtcccaatttcttcttcatgcagcgattcaccccgaccagcccgactcaatgtgtaatgcgctacgaggtctaccgtcacaaggacgccaccgacgagaacttcaacctcatcagcgacatctacaagcgcatcatgtcggaggacaagtacctgtgcatgcacacgcagaagaacctcaacactggtgtctttgtcaacggccagcttcaccccgagatggagaagggtccacttcatttccagaagactgttcgtgatgttgttacggaacactttgctaaggaggaggctgcgggtcatcagatctggcctgcgaagcatgatcttcctgtcggccaggagcaggataatactttccgtactggtgtgtctgactacaaggtcgatactttcaagaactctatgggttctgggctctctacggtaacggcgattgctgtatagagctggtgggtcgaatagagatgtttattgtatatagtttgatattgcgtcgcattgtgttgatgataatgattgtgaatggttttcttttggaattcagccttaacagaatggatatttcgatgttttgatatatctttgacctccaagtctgataatgaccagcctatactgaccaacttggaccgtagcaagtgtatgaacagaactgtaaccaacaaactattctaatcaaattatcccgctaacattacattcatttatacatatacattctcccaaacccaatcactcaacccaatcaacaaggaattcatccaacaaatcataattagtcctctccctctccctccgtccccgaagaagatcagcagcaatatcaaacttgggctcaggtctagagccctccttctccggcgacgaagcccgactgggaacatttatatgtcgaacgacatcagtgttcccttcaacaggcttagtactgggcatcccagactcagaatctaccaaatcaacctcaaccccagtctgcctctcagcatcatgtacttcacgcccatcgactcccacagccttgacaccaagcagcgacgagccacgcccagtcgtccgcctaggataatgatacggctccgaagacgccggcgactcagacctcgcacggctatcactatgatcaacggaatcaaaactccgcggcgaccacggcaacctctgctcaagcgcatctttatcctccgacccacgctgcctacgcgcaccagcacgcccataaccacccgggtcgcgcgaacaataccgatgctcacacccatcagtcaacaactccgtaagcaggacatttaactgcgccaagcgcttgacctgtctagccgggatcgcatcctcgggatactgtttcctcttacgggctccgcgcgcgccgattccgattcccatcccgattcccatttcggattcctgttcccgttcgcgttctcgttcgcgttcgcgctcacgctcacgctcacgctctcgactctcccgcagcccgcgcgactcaaaccgcggcgactgcccggcttccattttcagcgcttcttcctcgtcgtaggcgatcgcgggcttgaagccgatgccgtggtcggtcagtacttggttgaggtagttcacgcggctttcgaggaaggctacgtagctgcgtggcacttcttgttttgtgagggggtcatagcccacgcagcgcacttgggctttttcgcaggattcgcagcgcggaaggcgctggtcgcagcggtgtttgcggatgcgacatctgttgcaggcggagacgctgcggaaggggggcgctggggggtcggtgggttcgtttgcggtgggttttggggttgggttttggttttggtctgatgtgagcggtggggaggttggagggtttctgcgatttgttttcactgttttggagttggggtgtggagtggttcgtttggtttctagggaggaggtagtggaggttggggatgggagtttcagcattgtgtatagtttataaggaattgagattccaggagtatgaaatgaggattttaagagctacatggtaaaatcctttcagcaagattagtatactccttactccgaagctatgtactccaaatagggctaatatttctgatagagttcggattccggttaacacaccggagctcagttctccccgggtactccataacggaggtcataactccgagtgggggtttctttgtttaaaagggggatatataaagaggtcactaaagaggtggctatgtagagcctttatatatctgtacatagctcctttacccctatattctacttcccaaacctcgatatcgagcaaatcgacccgactcggccgaatgccacgttactggaatgtggagcagccgatatcaacccccacgctgaacgtcaaaacttccccattcggaattcgggtgagagaggtcgggtatcgtctcggcttaagacggaaagcaacgccattgggtgcatggacccctgcttgtccccgcattccttatatcttggagagcgaagtacggaagagtataaccgatctcgcatatctcggttatacatggtaagccttttggcgttcttccatataggattgtatatccgaatggaagaatgataactgaattctatatggaacaggtataggtatcttcacagttatggcaacattgaagtgacatcgttctagccctagatattctcatctcacccatttaaaggttgaatataagcttctgtacatactctcaaggaagcttcctccttgtcgatcttccaccctcttcatgtcaatcttccgtgtcaatcctccaatctagtcgagtataatcagctagcttcgccctattccgacatagttcaccttcctcaagatccacacatctatgctcatactcaaatcacccgaagtgtccaggatcggtcgatagtgcacctgtaagtgtaagaactccctccgttcactgtcccgacttccccccgcaatacccgaacactcgcacgatgtcagaccctcggtccctgtttcaagacaagccgtttaccattctgctagcgtagccgaagcacatcctccggtctaggaccctcggctataacaagcccctaggggcgatatcgtcccgagagtttgaccggcccaaaccgacagtggcccgcgggggaaatgacttgtacaccggcacgattgccgattaaccccgcgagcgagtctggtcatgagccccgttcaacaattcccgtacgttgtgaccctccttcaaagtgcttttcagacctcgatcactctactcgtgcgttatcggtctctgcttcgcgacggaatatgtaacccatcatatatatccctcaatcataacgctgatccggtaattcagggcgaagtggttttccggcagtatcctgaggcaactcctgacaaaactcagtcgggtcggtaccacgtatctctcttacatgcatatgtggttgtcgttgttgcatttccgtcccacgaggaacggccatgctagccgcagcctgccgtgttgctcttaaccgtctaactctcaaccaaacaagtgtagccattgcaactagtataggaacgcctatcccaacgccgagtccgagtgcaagctttgctgtcgttgtgagtgctggcggttgatcggtcgggctgacggtagtatcagaggaagggaacgaagatgccaaagttgaattgactggaatcgaaggcgtggtctttgccgtcgatgatctttcggttatgttgaaataggcagaggggaaaccgcctggcccagggttgatccagaagaagaatgtgggtgaataatccagatcgaagccgtagagttggacagtccaggtgaagttcgatacatggtccttttcgtggacttgggctggctcttgttagtctgggatcttggcttcggttcttccttgggcataccgtatacgttgcctcgagtgtaggcgcctcctcctaatggactctgctgccatatagatacgttgaacactggtaggtctgttttccatgcaaccactttctggtcaccgagtgtccaaactggactttttccgttgatgtagacagggttgatcatataattggtcttttcggctttgacggttgcgaggagggcagagagaaggattaagaggggctggaacaagcgtatcatacttttgatcttcaatagtggtatggcagagcttaaatgttagaacttcacgtagtccacgggtgaaaatataagaaaggtggtctctgacgagtggacttaagtaggtattaggggctggcaatcctggttaggggtgtaaccaggtacaaggctctgaggtagtctgtattgcaatgcaatagcgaaaaagagattatgaaggcctgggattatgattccagctagcaattttgagtgagaaacctgagggataagatagaagtgttgatacctatatttgcctcactctaaacgataatcagacaattgttaaaggtatatgattgtctctgaggtattcatgtttcacttcgtagtctccgcagatccagatacttggcagcataatcattagccaataccgggtcgcccgtaaggtgcataacagtagccttcttggccatcatcttcgtctggcccttgatgtcctcgatttcctcgaaatgatcatacgccgagtcaatgtacccaagagcacggttgatgtactcctttctcgcagacgtcgagtcccgaccctgcaagctccacaactcacccgccatgcccatatttgcatccacgagaagtgaatacgcctgcgcaatgagactgaaattttccgactccaggacctggggcataatgctctcgactagttcgcccgtggcttcaaattcacgaagactcagcaacactgtcgctagtgtgcagatggattcccagaggtcagcgaggacttttgagcgatgtgcgatgttggctgcgcgcatcgcgagggagaagccgcgttgcggttggccggatttgccgaggatttgtgcttttaggcagaggagcttgacttgggagtggacgtcgaagttctctggttgcatggagtgcgcggcttgctcgaccattctcagcgcgcgaccatagtcgccttggcgcatggtgaagtctattgaataaaatgctagaagtaggcgcatgtcgaagtcacggagttgcactgcctggagttgggatataatgtgttcgacggcaaccttgtcgttgctgtaggctgttaggaatagatctgtaagaagtcatacggttgtacttaccgacagatttgtcgtcgcaattgcagtagccctgaaaagaaagtccaggcgttgttgtatctgaaagctcggagcttctctgggtcgattttgttcatccgtgtgaatgcctccttgtaattgcctttctgtgccaactgtaggtgatgaatcagcatttctgtcatacacattcagaaaaaagttgacatactatttggcaatttcggaatgtgatcttgacaaagtcatcatgaggttggccctccgaatagcactcgcggaatatctcggtgttcagccaagcaaggtgtgtagctcctgtcggctgattagcgtcatcacaattactatacacttagtatcatacctattctagcgtacatggcgccttgtaacagcatgtatgcacccgtgggagttgaaccgccctttgtcacattgacgtgggatgctcgcacgaaggtttcgacaattgatgcaaggctctctccctgctcatcattagcatcaacttagtcaaaggaaacagggatacttacttgctgcatctccaacttagcctcgctaagtaatgttgtgctcatgagagaccacatgtcagtctccttggacttggccttgaggaaatcaaggccctctttctcattacccagcatgccactgttctgaacttcccgcatctgctcgggaaaagccttgccaaagtgatacatccagctcatgcagaagttcaggcagttcatatcatgagactcgcgagcaatcgctacggcctcctgcacggctgatatagcttcactgaaacactcaaagtccgcttgcatgatagccaggttcaaaagggcaaattgatatgcactgcggtcgagatttgcgtgcatggtgtagtcgaagtagcggtggagattgtcaaaggccgaggtatagtctccagccctccaggcgtcaagatatctgtcatttgtcaatcacaatgtacctcgataatgatgtatgcaagaacgtactccaggtaatacatcattacagggactgaagactctgaggtcatgatgcgtttcagctgagccctcatttcatccggaactctacctcccattcctgtgtctgtcagcacatggtcatgacagccggagagaattgcatactctgcagttcaccgacttggaattcgatcagtcgctctgcatccttgacgctgacttcttcctctccatcctcattatcttcgatgtcaccatataccacctgtgaaaggtagctggttgaatccagccccaggtcgcgtagattaacatcaaccgcgatttgatcagcctcgggatgtctgcgactccagtagccgtatgtgggtagacggtatttgacaaatccggcccagagcttcacagaatcatggaactgtagccgcgtgtattcaagataagctctgcgtacgaacgcaccaagtggcgagctcctagacaagcgcatgcgatcatcttccactggtggaattccattatccctgtcatggatcaattcgtcgcgtgatttagccaggagcgacgggatgacctcgccgaagaaggtttccagcgcatccagcgagtcgatggaccagaggttcttcagaaacaagtcccagagtgtacgcccaggaacagaggactcatggcgagacaggcattcttcaagctctgaaattgtcggcaggtaatgctcctcccattgcttatcggcggcatctagtgggaacagacccgccgtgaggaacgagaggacgtcaatagcagaagaattgggcacgacgccttcagtgtagagggtgaccagacacagcaaagagactctccagggagtcaaataacgcgtcattttgcctttgctatggctgccacatcttgctgtgttctatcacggtattgttccaagggcgcgcgtgttggataattgatcgacacctgaggctgcaaggccgcaatgcgggacagtacttgggaaaaaaaagatgacgcataattactttccaactcaccaattgaacgatttcacaatggctcaagctctgacaaccatagatctgcagggtgccttgcctcttgtcgccagtggcaaggtccgcgacctctatgaaattgacgataagaccctcctcttcgtcgcaagcgatcgcatttccgcctacgatgtgatcatggagaatgtatacaacaccacaattgcgtaccagactgcttgctgataccgtctacaaaatagggtatccctaacaagggtgttctcctcaccctctgtacgcaaacgtggttcaaggccctgaaagaggcaaacccctccctccgcacccacttcatcaccctcgacctcccacctcagatcccggaatccctccgccctgttctacagaaccggagtatgcaagtgcgcaagctacgcattctccccattgaggcaatcgtccgcggatacatcaccggctcggcatggaatgaatacaagaagtccgggaccgtacatggaatccaggtccccgccggtctgcaggagagccaggctttccccgacggtcccatctacacccccagcacgaaggcagagcagggcgagcatgatgagaatattcatccagatcagggtatgttcatttcgaatctgttggtttgagatatctatactagatatattacacaacgagaagacctcacctaacatccctcacagctgtcgccattctgggcgaaccctacgcctcgactgttgccaagatggctgtcgagctctacaagacagcccacgagtacgccctcgcgcgcggtgtgatcatcgccgataccaagtttgagtttggagtcgacgaggaaactggtgaggtcgtgctggctgatgaagtcctgacgcccgactcctctcgcttctggcctaaggaatcttacgctgtcggtcgcggccaggctagcttcgacaagcagttcctgcgtgactggttggtcagtgagggtcttaagggtaaggagggtgtgcgcatacctgatgatattgcgcttaagacggcggagaaataccatgaggcttgggagaagctcacgggtggtaaagtctaagtatatgatcaaggcggttatggaggggtatatatgattttagtgtagattttgtatttgtttatgattgattcgagacgagaatgaaattcaagtgtcatgtccaaattgtggccctgagggtgtagtgggaattattatacacatagttttatcctgtcctatatttactcctcccattcagacttcaaccccttgagacccttcttattcgaatccccatcctgctttttgatctcttccttgatggacttcaccttggacttcgcctcgggttgattagtccaaccagagctaacaccctcatcaagaggcagcgcataatcaccacaaatacgtcgctcctcttcaatctccgcctcactgatgccattcgtggcccaaatcttatgaatgcgtagatcaaagggaccctcaacacggtccgtaagaccaataccaatactcttaacacgctgccgagtcaaagaagtctggggctcaatgacaaagccgtgattcgtacgcacaaacgagttgaaaggcaagagaacggtttcccatccatttgagccagaggtcgttgtactggtagaggtagaaatgatcgtcgattcaggtgggacgtctgaaagcgcagcgggcaagccgctagggtatagctcctcgacatcatcgggtgagtctgcttggaagtcatagtcctcctccgattttggtgtgtcgcgtaggaggtggtgtcgcgtgtatagtctgtgctggtgaatatccgtctcgacgaccgcgtctgtctgcacgttgacggtgtatcggcggccgtcggacttgatgcgcagagcaaggtatgcatagggatcaacgtcccagtaaagtcggccgaagagccagaagcctcgatcttggttgcggaacgcggcatagcctggttgcgggtattagttaattttaatctttaatcttcattttcgtgctctagatccttgtctgtgtcgctaattaggcagctggtagataacataccggttctttcgacgcgccagttgtcaggaagcttggttgagatgctaccgtggaagcggacatgcgcgggagtatttgtagaaggttcagcgggttcgtaatctaggctggctgtgctaaagcctcctactgcgcggtcggccatggtcttgcatcctgtaacagtgccctcgttttcgaaatccaggaggacataaggtttagtcggggtgtggagggcttctgtgttccaagctgcgacagattagttgagctgcaagaatgacgacatacaacttaccgatctttgacagacggccgaattcatcggcgctgcgcctgaagaatccggcttgggctaaacgtcgagttggaaacatattggagtaattgtgaggataggaagaagctctgacgtgcctggagttgcttaattagctgtcggcttccgaggtggcgtgaacggccgataagataagtgtttggcttgtttgtctttgccctcaacttcttttatacttcagtttcattgttcctaaagacacatgggaccttgctaactctacattctctcgatcatatacacgtcattatgttgcaaatttactttccagggattcggaatttgggatttaagagtcacgctaggtgcacaagacatcttgaagacttgatcatcttttgtctctgttgagctttgtactcttgttattgaatgcaatgtatctgtcgatatctgacgacattctgatcattccgcatacttcgctaggcacatacctgaatcggttatgatgcgtattcctcttttgggaaggacatccaaagttcatgaccaactctatctgaagagtcatggatcatatgcgcgataaacctcttcatgagggcccagctctgtctttctcctgggcgtccggctttgaaccagtggttggactgactagccctggtaatgcctgattctgagtcaaggtcgctgcataggtaccacctaggcagtcctgcgagggctcccccggaaatataccgtggttagctcatatctactttcctgtgctggggtagcctagttctggaaatcggatatttcgatatttatcccaaaatggcgacggagatggtgttgatagaggatatcccacgtagttatctcgatatctctcttctcttctctatacattcataccacgctcgtttaccgcagttgaaccattcgtctattgcagtacaaacatccatttactctcgttgattatataccgccgcaatggctatgcattacgttgaacagaatatttctgcgcctgtctcttggtatagtgccccggagcctactatcatatggcaagatccccatgatacaggttcggaatctagtgcctttgaatctggtagctcgaagcctagtaccccagagcaacctgatgccaggtcagtcgagccatttaggccagttgagacagtccaaccagttgagctagtcaccccaaaggaaaccaagccaggagacaaaaagaagcccggagagggaaacaatccggtatacatgccgcgtgaagaccgactgaatcaaacaccgaccaagggaaatgcacagggcctctttcttcctgcttgttgtgtctttgtgggaaagtaggtatttctcgattcaatctgacactgtatactgactttgaatagcctctccatcaaggtttctcctgaaaagttggaagaagaccttacagaaatgatctctacatttggccggtgtcatgttaaaatcaaactatcccagggcgtgaagaaactgcctgttggatttgtacagtttgaagtgagtacaactgtttgatacatgagatatatatctcatatggtatactgacatactaaataggacaccaaagcagcaaatgctgcattaaaacaaaatggaaacctgatgcttcataatcgggtgttgagattggaatcatccaaagcaagacgtgagtgttctttttattttattggacttcatctgctcaacaccttttgcatcctgcaccctgcaccttgcacctttccaccttcgcactttctcactttctcaccttctatcttcacaccttctgaactttttgttctccttaggaactgccaacttcggtcgtctctctgatgctcccgtcgaaaaagctgacgtcgttgctgccctgaggggacgtggtagcctcgagagcatagctattgagcacttcgtcaaccaagacggagaagactctacctttggtgttgtgactttcgcataccccgacgattacgcagatgccctccaggtaagtcgactgtccaagtttgctttgactccactaaccacttgaccattatagcatttccaaaacaatcctgattactatatgaccagatccaccatggatcccaacgaccagcttcctcaggattaccctgcaggacacaggtcatctaaccagcctcccgcaaaccgtggcaaccagcagcgatacaacaacactggccgcagacccttccaccgtccatggtatagcggcggcaacaataacaacaatagaggcggattccgaaatgctcctggtcctgcccccagacagcaaaacacatcctttgcaaatcatggtcacagtcaaagcttcaatggccagggtcattcgtctcacggctctttctctcagaactactctggcaatggtttccctcagaacaacttcaaccaaggctatcccagccccaaccccaactacaatcaaaacttccctggcaacaacttccacccaaactatcagggcaacttcccgaactaccccaatcaaaacttcgtggctgcgggtccctttcccaatgcgccagttctgttcaaccaaatgcaaatgcctgaaggcccacccccgccatatcatgccgagtacactgctatgcaaaacccaggttttcccgtgttcttgggcaatcaatcataccagcctcccaatactcttgcaccaatgatgactccagttcaggctgttgctggtcctgttcctggcgctgttcctggcgctgttcctggagctgttcctcgtcgccggcgattgccccctcgtccagactgtcccttgattgtctccagccagcctcaatttgacaccgaacagcacctgcaactctactatgagccctatcccggtaacgaacccgtcgtgaatatgcagccaggctggaccggtcacacttgtttcgtgcagcctgactacaaccagccttgcccgcccgacgcatatcctcacagtcgccaatctagcatggaaagtcagcataacacctgttcgccgcccagggtcaatgaatccgagtcaatcttgacccagactaaatttcacatccctgaggtcgagagaggtcgcccactagttcggccgcgccatcccaacaccgatggaggctttgacacggctccagtgtctgctcctgctaaggctcagagagactcatcctctgttaaacccctggatgggtcctcaggaagagccagcaagtccactgatgctcaggttgagcccgctcttcctatgagaaagcctatcaagtccgagaacaaagccaccgaacctgagaccgagctcaacccgcctcagcctgaatccacctgtggtccgagtcatgatgaaaagaaaaaagaattgatggatgaaatcaagccaccgttgagcattgataccaatgaagaaagcgcagggtcctcctccgaggccggccctaagacaccagacacggagcagtctcgggaaagcgctaaacttcagactccagccaaagctggcttggtgaaatctgccggtagtaagacccctgatagcgctgaaaccctcaagccagccgacaagggcacttcggacaaaggcaaatctccggaagtggccacatccactccaaccaagagtggcagcaaaagacttgagcccgcagtgccagacagcaaacatctactggctcgccatgctttccagcatcgcaaacccctcaagaaaaagtaccaacccaagaccgacaccggcaaaacagttgagcagtacacccgtgagataaatgcgcagcgtgcctcggttgacccagactcgcgtgtccctgaacatattctgcaagaggtgatccaagagctagagaatgagcgcagagaaaatattcggaagagtctcggtctcggacccagtgctaaaagtagcatggacagtggtacttcgaagaagaagtaggtgatattgcagtgatggaaattatccaattcgattttcttactatgatggggcgttttattattatctctttcttactcttttgtccatgctggctatggtttgttctttctttattcaatctgtgtgtctgcgtttcaaggaaaagaaaaaactacaaaaaaaggggagcatggacatgctcaagtcaagtaccaagtatcaattatcaaatttcaaattttattctgcaaccttgctcattcctatagtaatctaatgtatcgtattagttctagacaggggtggttctgattctagccatcagccctatgtggccgtgagtatgaatatataaggtaaaagaatgaagtagctcatcgatgataatatgataatatctgagttgattgatatgactgacatggccgaaatggccaatatagcaacttgatccccgccaatgtaaacgccgagaccgaaagaaagccggtttatatacacaaaatgcttctcgatgccagattgcatgccatagataccgaaaccgaatgccagtgggggataatgatgcacgccgaacagaaaaaaaaagaacaaaaaagaaaacaaaagagcaactttccttatggaaacgctgatggatagattagatgtgggtcgtgaggatagagatgatatgtatgctgtgatgggggtatgaggtagacaagtagagaggggaggggaggagcggagaggagcggagaagcgatcagatatgaagaagataacgctgggagtaaaagaggagagattaagtatgtataggagtgggaattagtgcatcaagctctcacccgcctcgcgtcgaagaagccaagattgacggctgtgtcattgacgcccaggaacggcgccgcatcctcaagtagttcccaaggacggacagggtagggaccggcaacacgaccgcggcgttgaagacgaagtcgactggccatgcagttcgagtcggactgtccggtaggcaagcccggtgctgctgcgacggctgttgaccccagtcctgccggagagggagctgagacttgctgggaatttgcagggtattgttctgaaattgggcctaggaggtagaggaagcgagagtcgttctgaaatggagcgaaaaatggacatttctctttcaggaaccgtgcacactggtggcggacttcgtctgggaagatgtcgattagcgaggcggccacgtcgagggcgtgggtctgtaggaggattcctggacagggacggaagccttcggccggagtcggatgcgggaagtaatccgctgcagggaacagacgaaggacgtctccagggaggctcgagagtgcgatgcagaatattgaggtcagaagacggagctgttcgtgcagaggattgatcttgagagctggtggcggttgggcgaatgcggaccgatggaggacgatcatcctcagcaaagcagagaaccagaatgcaagagctcgctcgaaatttgcacgagccgtgttggccacacccacacccctgagggtactgttgtgcagggtgatgatcttgtggagaagggcgtccatcttttccacgagcactggagcgacagatggagctccagaatcggggatgctactcgcaagctcttcaataatggtaagatacattttggcagtctccaacgatcccagcttgtccggcaaatcaggaatatcacctagtggctcttcgagcagtgggatggagaagaacgccttctcggcacgttcccggatttggcgtacggcgtccgggctcatcagtgcaaccaggtcaatccaatgaagtctgtgagcacgacagtctgatacggcagtcttgaacatggcatcaacaatattggttcggtcttcagaccctgagtccgcatgaaatagaacttggagcttcaactggcaaaatggaagcgagaagtcatcagtcatacgggcaagcttttcaaccttcgagaggactgatttgccgtcggactgtgactcgatgcccagtaaaaggtcaagcgctttctgcacaacacccaaagcggctgggtattggtcgatgagcttttgcatgctattctgtgccgcacattcggggtgtcgcacaagaagatcacgtaacagcatgaccatagagtgctccagctcagtgtgcccggtgaaagaaccaacggcattggatgatgcggcgtcgcaaacaatcttgagcgcttcctcggagtccttattgagaaattcctgctgtgctaactggaaccgataggacaccaaatcaaaggacttgctatcttcaccagagacaagaagttgcacaagttcagcaggcagttgggctgcattagggactattgctggcttagagagtgcgagtctttttgcaagggccaagaaagctctgatagtaacgcatccgacaccaattagcggcgggagaattcgcagcaatacggtacgttccggagatcgcaaatgaccacagacccaacgggcgagcatgccatcaaaatgctttggatggaaagacctgagctgcgcgagataacggcaggcgtcatttgctgacaggttcgtatcgccattatcagactccaaatgttttatgagtgtagtgaaaatggtgtccagagtgggctcatccatgacatttcccgaatgcaaaagctgatctaacttctctcggaagaaggaatcaacgccatcaaaatcatctggaatgtgatccgacactggagaagatgcggccaccattgacctgttctccatccgagagagatcctggcgaagaatggatacagtattgagttcactcgggatgcgcaaaccaagttcaatcagagagaatatcagatcaagacttggcatgccaaacctcttcattccagcgtaggcatcaatgagtctccggaatagatcagttgtggcgccaattatgcaaagagagtcgaaatggcagtttgtggtatctgcaaccgaggcgagaacagtgctatcaccacaactagatgcaaacttcaacacatctgctaacattgaaatgtcgccaaatgtttcaagagcatcgcggacagtgtaaaactcggcgggagtcagcgcagacaccacagaggtattgccaatgggaaacactcctctgttactttagagttagtaagataattgacgagattaggaggaaaaagcgaatgctcactctgtgctccggttgtgttccgcaactgctctccgtaaccactggccaacatcggcttttacagcccaaggcaagtttgttggtaatgattcgaattccattgacgtagattcctggacaccgaaaattcccggtagacgttggctgatgatgtctttcacgctttcgatagctgcgttctctcctgaagcagagagcccagtacgattcagcagagtactccgcaagttcccaacatgctccggaagacgagcaacagggagttgcgctatcagtccgatatctattggtaagttcttcgcctgtaaatctgttagtgaccgaaacagtttgatctgtaaaatcgatcttaccttgggatcctcggctgaagatgatccattggtaacgcctcgtgccatgagccattgaagatagcggccaacagagaatgtctgtgacctgacaagttcagagacgacatggtagatttgatccacgttgagcttttgattattctgtccgctcgatagaaaggccagtatgtgactgtctacatcgacgccggccaatttccatttacggagcaggcgaacaccaatgtaaacccgacagagaccgtagcggaagggcgtagaaagccattccaataacttgaagaccaagacagccttgtcatcaaaagcgttgagatagtcaaatatagaagggagatcatgagagaagcgtatggagtcgagtagtcggacgatgtgttgatggggtgagcgctgggttgtctgtttcgagtgtctgggtcgttgcactcgcgcgttgcgctccgcgaggctctggaaaagagctttttctgcttcgttacccaaatcaagggcagataacacctgttgtttatacgtatcccaagaatttgggagtatcatcgaggaagtatggtcaagaacaagctttttgataaagcgaaatagacgatcgataagaggttgaagctgagtcaacttagcttcagttgcctattgctaaatgtcagtattggcgggcaccaagtagttgcaagttgaacacacctgtcgcactttgtggagcagcagctcagctaatcgtcgtccccttcgccgatatcgcatgatatttttccaatatatgccgagcatcaaaagccagattggaatcgtgacgatagaagcagcctcaaacgaggacaagaaccattcaaggaaatggtcatggtccagtaaattttcggaaaataaacgagcagtcaacccgactctagagataaggttagcatgctcatagtcgacgcaaatccaagggcacgtacgcatatgtcatcttcgccttccaatccggagacttggtggcagtacatactccttcaacaaattgctggacattcgtcgtccagtctcggacccattttgcctctaacccaacagccaaagcaccactggtgccttttcgtttgaaggcacgaatttcattcgcacccacacattttgccaaccaaacagcacgtgcaactggaatacatttaccaaggcactggtccaggaggaccttgccacggataccatgggggatggttcggctcaacctccgcagtggaacagatgggttggcgagatctcgaagccatgcctcacgcttattatcggtgagtgtgactcgaggcggcggtttaaaagttgacggggcgtgaatagtgttgtgactttgtcgtttctctaacgctgcagcgaagacggacgaaagcatttgtaaccccgtgcgattcttgagctgcgcatataaggcaggacgcgctgtattcgattcattctgcgagacttgtgtacggtcataatacccttgtttcgtggtttgctcgctcaggacgtcctccggatggtttccggtccatggggcgaagtcggcgggttctgtaacggacgattagtctccatagttaagattcagggatctggggtcgaattactgtgatctttgtataatggtgcgacggcagggatctcaatgcgatacggggtcgtttgtacagccccgacgggggagctttccctcgacttcacagtggcgcttccctcaggctcgggcacaaaattgttcatccatggctgggccggtaacggaggcggggacgggggtttcagtgcagcgccatcgccccgattctcattgctcgggatttccgacacgagagcctggaaggaccagacaggacggccgcgccacgaggctgcaggtcgcgagattacacttccggggttgttcttcgtttctcccaccgctaggccagtatccgacgtattcgacctgctcgggacttccagtctcggtcttttcgggggcggttctctgtcttgcgactcgggaccacctgcggtcaagtcaacgacggcgggttgtcgaattggcggttggggtagtgaggctgacctattgggctggtcatattgtcccaacatctgcgcattatcaacacgtccgagaccgccattgaaggttcgcagagggtggccccacggttggccgccggcagaggaatgggggatcatcttaggttcatgatgtatccaaagggaggattattcgggtcatccaggcgatgttcggtttcgagggattcgagtcaatcttggaaaatgggtgtaaacgcgcggaattaggtggaagtcgggttagggtgagctgatgtggaatcggggaatggccactcgggtatctgggtatctggatatctaggtatctggggttgatcggggaaaacacacaaatgctaaatgagggaaaggatcaatagggttgtacggagtcaagtacgactggagaatatagtatgtactctaagtcgagagaagtgcaagagttcaagcgtccaaatgtttatcatatgatttgacgggtaatgggctgacaataccaacgtggacctgcactctcgctcatttgcccttttcctgacaatcgcaatatctcgggattatttcctcttttcttcggtctttacttggtaaatatccgagtcgtttacgtacagcgctgacatttccagggcttcttattgcctatatcgttttgccttctgtcagtccgtccgctcccggaaatcgccctatctggtgatatgcctcgccggcaagatgtcttagccgcgcgattactcttgaaaccccaatgtggactattgaggactgttggaatgaacaatccaatgccaaactacccatgatctgtcacaccgtaagtccaacgcaacgggccgttcccattctctctcggtaaatccccgaggctttccaaatggcttatcgccggagctccatgacccgtggacattccgcagggcgcgtatcgggtctatcgggtctttgcatctccaatttccaatttgactctgaacccgtggcatgtttgactcggggcttaaaggcaatgcatgtgccgatgtatacccatgtccattctatgaaacaacagcgagaactagaatatgctaactgcaagggattcgttgtaagttgtagactacggagtccgctgtaccttgttatatatgttgtaggaagtgattaatgcacagccatcacacttcatgcagcatacatatctagaccatgacacaaaccctgtatgatgtcggcggatttttattcgtattatcttcggactattccatttaaagccatctgaatgactctatttcatatgaatcgcacgtatgttgcacattgtacattatagcgatatgtcaacaagtgtttatctagcttgacatattccgatccctacgtacttatccgttcagagaagatatggaaaatacacatgcataaaagaatgaagtactccgcacacaaaagaaaaagcaaagaggttgtccatgctccagctcggagatattcagtccggggttgttctcggaaagtctagcccagactggcatcgccttggcacccgtggccgaccccgggggggccagttcgatccttctggttaactcaacccatccccttgatatcatatcccaacacaatgtcgtcaaagaaagatatgcgcagagctgatctcggtgagtggaagaggaattgcttcgagccttggctcatcaaaactaacgttgaaaagtgatcccctacgtcgatccacccaagagcagcagcgatgcagatatctccagtacgcaccatcttcgttgtttcgacaatggcacgcttcagtgcgaggattatgaaggctgattgagctatgcaacaggcacaatgtcgagcactatgcccatggcggctgtaagttgtggcccaacatctgaccttgcgataacttgaccctgacctcgatctttcagatgtttactcggaaccggtgagtcgcgcatcttacacgagttatagacagtattgacgaatgtcgcaacacagcatgatcggatggtaagagcaaggcgagcagtcaatggtttggctaggttatctgactcggaaatagggtatccttcgtcttctcacttcagtcctggctgggtgaatccgcagagcagaagaagactgcttctacaccggcctacatgtcggttctcatgtcctgttcgtttctctccgtacccctcgtgtttgcaggactaatcttatggcgcgttatagtgatggcattggttgtcgtatgttttccgaacccactaaattgcgatgcgcccagcttaacaacccctttcagacctatttccctctcttcttgcctccgcaggctccagggggcaccaccggtgcctccgcaccgactccgctggcctcttgaacgcccgatcctccttgatatccacccacatacctatcataatcttcacgcagtcttatcatgtgaaatacaagaattaattgttcgcgggtcatcggattccaagtccggattgagagatctccacggttatctattgctgtcacgatgtagccatattcaagccgagttctgcccttgtgatcaggaatcagcctgtctccaccatagttgccaccaattatttgctagtttaaaatagatattgtatatgatttccccttaatatgtagttcttgcgcgctcctccaggggggcttgatgcgcgagaatcgcttagtcatacaccgcctaccccacaacgtgacccttgcctcaaaaggctctgccacttcttctctcgttcttcaaccacagcacctctctcctaaccacgcacgctccgatcttttacagagatattgaatctcgtccttcgctcactccatcaatacccattttaaacgccgtttactacgaaaaggccgagtttatgtccatcgaaaacctcaagaccttcggtaagttcgccaccattcccctcctgagcgcgtatcgggcttcaacccccacccgcacgcatatccacagctgtgatgactatgtatgcggatggcgacatatgcctttcgtcatgtgtagtgcgcgctgtatatttcagctctccccgcctgtgttgcaccgagtctcacgacggcgggggagagatttgatactgggctgagactgacatgtgcatattacagaccccttcgccgaagccgacgaagataccggcgagactaagcagtctcagaactatattcacatacggattcagcgtacgttcactctcctctcctcacctcctgtcctcaccgcccatggctgctcttgcgattgccggcgcttaaagggggggcacatgctaactccttattccacaacagaacgcaatggtcgcaagactctgaccactgttcagggtcttcccaagaagttcgaccagaagaaaattctcaaggtcatcaagaagaagttcggtatgtctcgtgacctatgcatacgtatgtccgggtcaaatgctaactatatcctagcttgcaatggcaccatcgtctctgacaccgagatgggcgaggtgattcagctgcaaggagatcagagaaaggatgtccaggagttcttgactgacaaggaggggctcgagcttgatgccaagaccatcaaggtatgtcgctgccccaatacgtcctccgtcaccattaccagttctaatctgtcatattttaggtccacgggttctaatcccatcaccaacatcatgcctcgttcccgtcccctcttcccggtttatgttgccctgtgagcggtgggataggaagcatcctcatccgccggccgtatacaatatacatactggccttcacatcgatcgaatgtcttgctttctccccccaccactctgtgcctggcgtgttagacctgggcccttcgtcgacatgacccgctacaccagtgtgcccccgcctatcgttgtcacatgattagcagggagcggggtggatcgactgctattttaggacgggattatgacggaacgaggagttggtagatacccaatatctgcatagacagacaacattttttttatcggcttgcgtgttttccattcttttatccctggagaaggggttgcctttgcttgtattgctaattaccattgcattcccatggtcaattttgtcagtctggctaatcgaggagatccaggttgaactaatggcgtgctattgctgaatcgttttctcggtctctaccgtctacttttaatatttgtgctgttctcgctctttgttcttgcgacaaggaaattgaactgttctcgagtatcatcctccagctgatgcagcaacatagagtaaattcgagataggaacttgctctctcagtctatgtttaagagggtgcgcgttgtgaatcaatcaataaacaaaaataatagataagatctatcaaagatcgccatgtctgaaaagaaaaacttccctaggccaggggtatcaagcgcaacaaagtactcttccagtacttttgctaaatcaaaatcacaatcagatcccaaaaatgtacaaatcatgcagcctgccagccaataacgcttgcccaaactgtggaaaccaactctgcagaatatccggaaacagaaaaagcaacaaaagtccaacaaccaacaggcaagtaatcaagctatagctctcccataggaatacggtcatccgcaattcgcatgcgcaggaagatggccacagcccagtcccaaagtttgcgggtaatgacgaagacaggcacttctggttcgttttcacgggtcagatgcagctgcatgaggagcgaggacatgcttaggaagcttgcgacggaaacgactagtagcgatgctgctgtttcgcgtttgatggttgcatggttttgcgttgcgtggtaaacaaatgttaaagactaggcgaagggtcagtggctgttgcaaggtcgatgaacaattggaagtcaatgtaacgtacggttgttatggagatccaggctggtaaaaggagtctagggtcagaggatgcaccagataggtaaaggacccaagaagtgatatatgcaatcaaaccgttagttgtaagaagacgaatcacaacggctggtggtgtgtagtttaaaagcctgagtatatcacagattagcattatggacatagtgggacgtcaagggttgagaaaaccaaccaacgggacatcatgcaatcagcaaagaaataggaaagatatgcggatgcacagcactgtcaagtagtcagtataagagtaggccgttggaggatagcatatcaagggaatacatacccacataatagccaatgccacctctgtcacacgaaatctcctctcaacatcccattcctgtccaacactaccaacaatcgccgccgcccacccctctcgtcccatacccggccttatatgcagcaattcggcgaggaaggtaaaagcgcatcgcaaaccccaccaggcagcaggaagcgtgctcagagcccgacataccagcaggggaatataccacctgcggtccactccgaggatgacagcaacccgcgggtgcagtgctgacttggggccatcgctgctgggtggagtatgggacgaggaagtcggggaaggcgggacagtcgaagcagatggagaagccacctctttaggcagtcggctttgtagtagttcgggggaattgctgaggtagctgggcggacgagccggtcgcgtgagattcaggtctggagcacggtgtggatgttgtggatagtctcggggggtgtatggtggaggagaggcattacgtcgaggaggagccagcctttattctgaatcgcggcatatgcggccgccacgcaaggaagggaaggggtataggatgagtattacaatcgagtcgtgagctctcgacaaaagattcaaaattgggttgttgtcaagccgtttgcgagtcccctaattggcagatatcagaccccagtgtgtggcgggcggtgtctttttcggaggcagtttaattttatatgctcgacttcgttttacatatgacagtgggattgaagaaacagcgaggaagatataagctgtagcctcgataagagggcgcttcgttcacaagagtcccggggagctacttgttgctgtcgaccgcagtgattcacgtgactgacagttccgcgggtttcattcttcggcgaggaaccacttctcttactcaacctgcattgcaatggcgtctaccataagattgcccgcgggcacatccgctcggattgtcccatctggttcctttgtacaatgtcgggccttctccgagacctcccaacaatggcgtgggagacaaatgaacttccgtcctccaagccaagtgcagcccgccttcaaaaccagaacccagggcatgagaatagccgatctgccaaatgatatcggcatattaccaggtacctttgtccgaccgttgtggagggacatgccttcgattttcaaggcaccgcgtgataggtggcatatggaatggacatggctcaaggcctggctgagcaaccatgccaggttagttatcctcgaattctcggactgctcggtacgctctggcggttacgctgatcaagagctgcttatgctatatacttacaaagatgtctttcctaactatattccagtctgctccaatactgcaagcgcgaaaatacccttcctcttctcctaggcaagcggcgccatttcgccgcaaagcttcataatgatgcgtttacagcatttgccgagtaagcatgagtcttttctcccgtttaattttcagcgggactaaccgctatgaattgttatagaggcaacatccctaaaatccgccagatctgctgcgacaatctcgccaagaacctcagcacagctatcgaacgccgcccaaagaatgagcatttaacctggaaactggtgaaatacctgcgtaagcccagcacaaacttcacgggtctccgcgtcatctcagatcgcgcaacatccatccccgatatcccgaaatccggcattcgtcagattgttgtgcgcatcacgagccgacaggccacgactcggacccagaaatccagcgggaagggacctacagaagatgtcaccgtcgacaagaaggagcaggactgtaccgagcacgttgtcattcagcatctccgctggaacaaccaggataagggctggagagtctggggcaacatcacccccaccacattgcatgatgcttggactaatccctacttcatgcctgggttgtcggccctcgagcgtctggacatgatcaaggactcgatgggcaagaaataaatttaagtcgcatctcaaactgtgatttgtatttctttctgtcagaatgatatctgcgcatttggaagactgcgactataagatccgcacagacgagactatgaccggccaagggttttctgacctaccatttcattcgatcaacagcgaatgggtttgacagaatatcctttatttcaccttcttgtctaacaactcctcgtttgggcctaacattggatagaggctcaggtcagcttctcttctggtccgttctcttcctcgccacggaaaacccttgatatagaagcatttacacctccctatgtaccatagccacctgttttgataaattctacctctttttgagccgttacctgtataaatgaatatcaatctctcaatctccttcctgtgacctactactttccctaccatgtactctctggatttaagcttctttggtacgattgccctgactctagaacaaataccaccaagaatatgcggcgtcctactactggcagtatactgtatactttctaccaatgtaataccaaatacgccaatatatgcattccaacctgacatcatcggtaacacgattatacgttgctaaagtcaaaactaaggactagccaggatgtatatatacaatcggaaggcacaaaagcagtttttaacgtgtagcacaggtatcactccaagaacacaagaacaagaacaagacgtacgaatgaataagaaaaagaggtacaagagagcaccgggaagcgacgcatcatcaaaacattatacgtgggtccgcggaccaacgttcatatcccaataaagaaacaataaagaaactaggaatgggccgggggcgaattgatctaatcgtcgtcgaagatctggaatgtgttattcaggatcgtctcgacgacacggacttgccatgcagcgtcggcgatgctgccgccggaattagcgcccataagggtgggtctatagcgagagttagcgagtctgtatctgatagcatcctgtttatatatgtaggatgtggactgtgcaaggacatacccgaagcaaatggctagattgcccgcgttcatgcggttctgggtatagtgttcttggatcttgttgagatgctgtaatagactgtattaatatctgatggaaatagagatcgtgttcttggggatcgtaccagaatgatggcccggagagtagcatagtgagcatcgggcagactgttaataagggcgtgcatcgagtctcggcgttggatgtcatcgtcgaagcctgtggtttcattgtcagtttctcaatacgggattctcttcatgacgtgaacgctacttacgggcggcatcgacaaactgctgatagaactgagtagtgaacagagggtccggaaggtccctgaagaattgcttcacaagtcctgcaacactgttgacatcatggtaaaagttctccgggtttgtgaagtcgacttgggatgagtctgttcatgtgaaattaggttagcaagctgcccatctcatcaactgtgcgatcaagcttaccattgtcaaagatggctttcatgtgactgatatgattagcactacccgagagtcggtagatgccctccatatccagaccgaacagctcaattgcttggaagcactggtacacaatgaacggaactgccgttccatcccgggcgtacaggtcgttcagcgaaacaccgaatactggcttcaacggaggaagatttgattggagactccggtccattggaggaggtccggccattggcaccggaatcatgggtgcaggttccggagcagacggtaccgacactgggtagggagctgtacccgctgggggcggggtgaaggtcttctccggctggggagcataaggtgtctgtggctgtggcaaccgatcaccgctctgcggtggctgaaccaccggcgaggtgacattattcgaggtgaatgccggcagtacggttgacccgcgcctattttgagtcgttggctgcgaagctgccgcagacgcagaagaaacagacccaccaccaccgagtgtctactcaatgggttagtatcgtgaagcaatcgagggacaatgcaggacttacagggtggcgctcgtatttgacaggttcggaagccacagcccccgggttgccttcatggcttaaaataaactcatggagatctttctggttatcgacttggcgaacaacatcggcaaggctcttaagtcctaatgccccgctcgcatcggtcttcaatgggctgacgcaaagaccttggcccagaagcagtttctcgctgaaagtagctgcaaataataagccgatgaactgaacaagaaagccacctacgtaggaaggaattgcacataccaaacttctgctgctgcagggtcaagcccgagtcacattcagcgatcaactgctgaagattgtgtacagcctgaggtcggtgcgtagacaccagctcctggcgcgccgtctgcgccgcctgaaccttagacccataatcgctatccgcgtgctggaccttgcgcaacagctcctcctcgtgctgcgccgcagacttgtggcccttgagaccgaactttccaccctgcttgtctcccgtgcgcacacggtcatactgctccgccaacgactcgtacttggcctttgccttctccgccagcgattccgcatcgacgactttcttctccgcagctaaccccgtctgtttccattgcttgcggccgcgctcgatgttgccggcaagctcgtgcaggtcgtcggacatctggtggagggagacggcgaattggaggccatggtcgaccattcgctcctggattcggtggatgtccttgtagctggaactgtacgttccttgtcggttgtcggtgcgttgcgccacatcgctgatcacgcgggacagttttcgcagcccctgagcgtgctcttcttcgagggagcctcgctttttcaggaaggttgagaaatcctagtagatattgtgttagcattcgcgatcgtcgcgggagtcctttcgcgactactaaccctggcggaggccacgctttgcttcagccgtgtcaggagtgtggttatcccgatctactcatgattaatataattgcgtctttgtttagtatgcacctgaaggtggattctttgtgtctgctcacatcagagtagataactttgtctaggcgggctttcagctcgtctgagatggcctcgtgggtcggctgggtctgctcgcccccgtggctaggggatgaacgaccggcgctcgacggaggcgcatcatgcgttaacgtcgaatcgtgtagggcttgatccgacatggaaagggtcttgactcgtgtgaatgtcaagagagagagttaaatagaggggggtgggacggaaagcctcacgggccactattaatggagtggcagatcaaaatgaggtccaggcacaggaacagggaatgctgcagccttctgcagtctcaattgggctgaaacgtggtgaacctggcggaatgtcttagtattctagtggtgttcttggggtcaagacgtaattgcgggttcggccaagtggatcttgggcttcattgtacgtatggagtgacctcagtgtacgtggtatggtgaactagtgagctctgcgtatttacaagcttaatacacaggaaaaatcacttttattctggtatcgtcgctagaatcaaatatcaacatatatacaaaacatccatgccagtaactcgcatctacaaaaccggaggtgcgacgaaagagtcgggaataccgtcaaagacccaattgagagaatcaaagatttccgagaacccagattcgctgaaaaatgctccgccttcgtcaaactgagctggcatcatcaaagattgatcctccagggagctatcatgttgccgcgtcatatgtcctgacggacctagtatatcttgattcgctgctatggcggcagctgcaaaaggagattttgttaacagccgggataaaacaaataaggggggaaaaagcaaagaaacttaccttgcatctcttcgaggcttctcaccggtcggaaccgttgtcgccaacgccaaaccgtgtcgtacacatgactcatgctcatccggcagcggactttaagctgtagggcatcttcttcggcaggttctagactcgtggcattccacatctgagcgagaatgtctgcaagacgaatgggacggtcgtgatccatgacacttattcggcgaattgctgagatcgcgccgttgaacagtagcttgccatggttgaaatcgaggtgtctactgaagctgctcttcaacaatttcatcagagcgaaagcagccgacacaatcatttgaagaatatagttggtggagtgaccgatcaattcgcctggcgatgtttcgagatctaatactcgactaaggaaggaggttgtcgcaaggaaaagcttgataagatcgtcacttcgcgcagtggatcctaaaaacatgaaatatcggaagtgtagttctgcagctcggagatggatcgtattgattgcttggaactagtgtcagcgtgccaaattggaaagatacgagattaactcaccagagatctttccttcaaactcgacatccatgtctctgagttcgcattccaaaacctgcacaaccacgagcttgtcggcgctaataaactccccaggttcgggtttactactgtataacgcctttgtcacccggtcgcagaacttctcgatacgcaaccgaatgaccaggtcttcaggaagtcggtagtcggcgtccctcaaagaggcaggctcaagggcccagtcgtatattgtactcggtggctggccgtaaccagtcgcaacactgccgaatcctaaatcagtctatgacaaacggccatataaaggaaacacccacttttgagccacgatgttacaaatgacccacgtatgtagtcgatcctttagggcttcaccttgaacttccatgcggaaagttgtgaactcttccgcttgaaccggacggtgtagcccaagctgcatggcaatttgcatcatcaagccactgagcatgaaggttgcatcggtgcgctggcttgtagtcggaagtggccatgtacacagaacgcaaagggccttgaccacccggtagtcttgcgggacactagtaatggttgcccaaagcagtctgctgaatggtccggacagtgcgctcaagagcccaggctcatattgagaccgtcgactcgcaacacagatcatagtccacgccaaaagagggcatcgattgagatacacctctgggggcttgggtggattcaaaagaggaagaaaggggtggtaataagtgaagtatctatacagatgtcaatcatagaaacgggccaagtaaatgggtagtgcatactgttcgaataatcgaagaactcgggctctagagagagaaacatcttccagtcgccattggccctcatcctgtgatacaatagaaccatcccttttcatagtcaaaggggttgctatagttgaatgagattcaattggcacggagacaggtcgagattggtcaatcgcggccgagtcacggcgagcaaagacatcctctgagcaatgggacatttcatcaccaggctcatgagactctacaccttgctcttgatctgaattgggtcccagacggcggcggagatcagcaatctccttttccatttcagcattgcgcctgtgaaatggagtcaataagatgagagagaagacgaaaaccagacaaaaaaagttaccttctcttagagatgcgcttgaacgactgttcaactttacagtctatcccaagccggcgacagcgcgaacaggccgccgctggcgtttgaacaatatcacaccgcagctttcaaggtttagagacatcagcgcgattgtcggagaccggatgcggttggggttgattttgggtaaaatcgcatagtaattatatgcacatgactcaccttttgctgcttacattcattacaggcttttcggctgccacctcggcgtttgcccgtgacaggcggagccttctccatctcgcaagattccgagcttgtctgcatgaaatcgataaccgggggtggccggggtagagtgggggaccgaaagtcggtcggggggattgaatagtgcggcccatccggtgccagtatgttccgataccccaaatccatggagatcagcctgcgttcagccggtataaaaccccacgaaacgtgaacgagtgctcgcggagtccatctgccgtaaatcggagaaatcggcccgctgaaggaggatgtggggagcctgtctgccgattgaggacgatgatttgcgggaaagttgacgccgagacgaatgtcggcggttgctgagtcagctggtgcctgaggcatggatgatgtaatctttccatgatcccaagttttaagttacctagtcaggtagccctagagcaggttgagctgagcacgttgttaggcataggcatagggttatgtattggatagatacaccatcttctgcatagggattatacttcaaagactagccaattgctactaagcattggagagttcatagcatccatggatattgccttaccgccagaagtatataaacaaaacactgaaataaacaaaatttaacttatattcaagtggagatcactggatcgaagaagtagtatctagagttcttaagtcatagccgatattccaatagtcaagccttatatatgtggacttcatgccccgcttgccatggaccgaggtcgatgtggattatttgattatatgatctgcattcaatacatttacatatttaactccttaatcctttgtttctgcaagagttatcattccaatatctgatccaagatacgagtgtataagagtgcgttgtcctacagtcctcctgctactattaaccaagactaacaactcaacccaggcatcaatcatgtctgagatcaacgccaccgcaattctcgttccaaagcctgagaaatttgaagaagttagcacagccccatactctttgacagtctaataatctaacatgtcgtcatcctctaggtatctactcttgtagccgaagtcatcaaacaggtggaagaacatgaaccggacacactgctttactacgcattcccaatcaaggacaagaatgagattgtgatcgttgagaggtaagtcaaccagcctgtataccgtggataggtcgtctcttggtagctcccccgcatggagaaagcagatgtgcctcggtccaagtaccttgccgtccaagattctgatcctccaatatacaggtataaaaatcaagtggcgatccagacccacgtcaaatcaccctatttccgaaccttcgcagggaaattatccactttattgacgaagccggcggagatcagggcaggtggattcctgagtggttcgaggggcgtatcgcgactgtagttggttgtatctgatgtctgggggtggttgggtcgatataaataggatgcatcaactcccagaatgattcgacattgagtcggccatgtcccgtcactcgtgatcgacttgtcatgcgattggtgcattagtggtggcggcccagcagatatcgggaggtctgtgagatatttaggagcaattcggccctatcagacgaagaaccgacgacgggggcatagagcagggtattcacgaccatatatcctccgtactttgtatattctcgattctgatattctatttagacaccctcagtgtcaatatttagaaaattaagtggagacggactctttttcttcagaaaaagaatcttgaccttggctaggggaactagtccaatcacttttcccttttttcccctttctgcctcttcttcctcttctttctctctatatatgttttgtattgttcttttggtgagttccaaatcttccttctgtctccacacctctcccaccccctcttttcccaagctccagcctcctagcttcttcccttcgagctgttccccccctgaagctcaagctgatattctgaagatacccttgccgtgttgacattgtgtccttctaccttatcgctgccatccccttatcgcccagcccctgttgcaatctgccttgatctggcctgattcatacttttttttttgcgacatggcgtcgggtccggctactcagtcattgaaggtgagcatcggatcggatcagcgatgcgcggcgtgaattgacagtctatctagtgtgtggtgaccggtgatggtgcagttggcaaagttagtataatcccccgacactatccctacttataacattgcaatagatgctgacatccattcctccagacatgtcttttgatctcctacacaacgaatgcattccccggtgaatacatccctactgtgttcgtaccctctgcccctcaatgcgaaaccttgaatcccgaacggatattgattccataatagctttgacaactacacggccagtgttatggttgacggccggccgatcagcctgggactgtgggatactgctggacaagaggattacgatcgcctgagaccgttatcttacccgcaaaccgacgtctttttgatctgcttctccatcgtcagcccgccatcattcgataacgtcaaagcgaaggtacgaacggggacatcccatactctttctagtttcgtgcgactaaccgttcccccgcttctagtggttccctgagatcgaacaccatgcccccaatgtccccatcatcctcgttggtaccaagctcgatctgagagacgaccgcgccactattgaagccctccgcgcacgcaagatggagaccgtctcctacgaacaagccctagccgtcgccaaggagattcgcgcacataagtaccttgaatgttcggcgctgacacaacgcaacctgaagagcgtgttcgacgaagccatccggtgagtcttcatatcctttcccggaccgcttgtggatattcgttttctaactgtctaccacagggccgttctcaatccccgtcccactacgaaatccgggaggaaggcagtcaaatgcaatctcttgtaaagcacgtttgtttggcttgactcgtctccccatgttctcgtatgctacaatgagtaatatagtgttaatacggcgtctgggtagttagaggcctttttttttaattccgccggccgcctctcagtgctgttttgtgatgaaatccattgaccgtctttcttggcgatatttttgtcgttgcctctctcggcttgttcatagtctgtcccaattctatcgcgatgttcttgattccgagattataccatggtcgttctaagttattatttcatgtcataaatgtccactcgggcaatgtttgggaagaaagcacagaaaagaacatatgaattggtatcttcaaaatcaaaacaatagagacatgaagtaagtaatttttggaatacataagaaaaaaaccagccaaaccagatgctcccgggaatgcatggctatcaaaatgtccagctgcctgcagatgctccggacaccttgctgtacactgttccaatccctcaacgagttgagaccgttccaaataagccacgacagtgaaccagcgatttttttgatctacatccggcctctgcggctagggtgcagaccagcccactgatcgttgacagcgctgccagcgttgtcggctgcgccatccaggttagcagcattcgcaccagagccgccagccggggcagccttcttctcgtgcttcctcttgtccttctggatatccttagcctggcgctggcgctcctcattgagcttctcgttcttggcctggatcttggcattgcgatgttcggacttggcgccgccgccaccagcactagaattgagggttagtatgcggctatgactgcagttgcttggagagcaattatattctcgaattgggggtaactcacgtcaactcgacgttcatgcgtcggggtgggtactttccgtcgtcgaagttggagtggtggtacaacttgagacaggtcttcatgcggtcgtagttgtcaaactcgatgaatgcgaaaccgcggcacttcttggggtcttctttcttggttgcgacgcggattgtggccggggggttcttttcaaagtgcttgctcaaggactcatggttggcggagtagggaaggttgcctgtatataggaatatcctttggttaattctgcgtctttggttcgggtagttcatctggattggaatcacttaccgacaaagcagatgaagcgggaactcttctgggcttgctcgccctccgcagattcagcggtaggctcttcttcggtctcagcagcgggctcggtcttctccttcttctgctttttctccttcttgtccttcttcttgtctttcttctccttcttatcgctgtccgccttctcggcggggatcacgtcaatatccatagcgtcctcggagggagcagcaggctcggcgtcggtctcctcggccttgcgcttctccttcttctcagacttttccttcttatcggacttctccttcttgtcagacttgtccttcttctcggacttatctttcttctcagatttgtccttcttgtccttcttttccttcttctccttcacctcttcctgtgccggagcagcagtttcagcgggagcgacaacctcggactcctcttgcgacttgcgcttttccttcttttccttcttgtcttttttgtccttcttctccttcttcatcttcttgccctcgggctcgacgacctcatcctgcacgagtttgcgcttatcgcccattgtgtttgtttggagtatatattgtgatgaaaagagtcaatgataggatgcgaaagcaatcgggacgaatgaaagttcgggtaatttgggaaaacaagaaaaagaggtggagaactttgcagcgcaacgagactcaagctccaaaaaaaaagtcgggcggagagaaaagtgaaatttatttttgccgtgtctcggaaggcggtcaaggcgcttgctgataagcccttgattttatagttcgcaatttatctacttactacaagcaattgtttgaatacgatcattcaagtgtgcatttactcgaatcatatactagtataaagttcgtgaccagcgctctgttagatcagaacaccaagatcttcacacccttcttcaccccatagcgctcacgcagttccggccgagtaagcagcttcaacagcggcatatgcgtgtccttcatgtcaaagatgcctctttgcttctggtcaatgtgcgatccatcaatgacaatgcgctccagttcctccaggttgagagttcctagaagatattatcagcatctgtatatgtaacgaagtgagctatctacagatagcaagcaagaaaactcaccagactcgatcaaatctgagattctggttggggttccagccccgataccagaccgagcacgttgaaggaactgcttcgcttcctccaacttgatgtgtttcgcgaacagctttcctacaatgctatccttggtttggaaagagcgcagtgccctattaaccccaattgtcagttccggcttcgattcattccagaaaaaaagactaaaagttgtccacttaccgtacaacatcagcggctcgcatagcagcacccgaaataactagtgtatgaggggtgccgttcttctcggacgactttgacaggtcggcacctttactgaacgatttgaggaattcggggagttgctcgagctttcggctggaggtgaaggaagaggtatcgaggaatgcggaatctatagattggttaatgtctagaacactcctcgaccttggccgacagaacaagaggaagtatacatacctggaatcgaaagatcactcagttcaacagcagaaagctctttttcgtgtcttttggctttctgcgcaaagtgatcgcccaacaaccggccgtccatcttgccaatcgactcgtcaatgccgtctttgcgtgttgactgatgctcatcgtgttccgcctgcttctttttgttcttgttcttcttctgcttcttcttgcttgacccctctgcgggtgtgcctgcttcgggcttttcttgcttgagagcagcgtcgtcggcttgtctcttgcgcttgttttggagcttattggaaagtcctttgggggcgtttgtgtcagccattgtaagaatagcctgtatgaactcggcaacaaaatcttccgagtattttgagcttcaattagtaaatgcaagtctcgaagacttcattgcgcaaaaaaaaaaaccggctgattcagccaatcttatcgataagaaagggccaatcatgcactggcccgcaattgttgtttctagacgcgacagacaaacatcgacatcctgtaattcaccgtttgcccagctgatctgggattttattgtggtggggatcccttatgtggtctattatattgtgcgtgatatagttgcacctatcttgcagaaaaaaacaagccatgtcaacttctacacccaacgcgcgtggccgtcggtcaccatttgggaccgctaccccatctggggaaacaacattgaccggagtcagtgctacccatcaccatttaagagactataaattgataaccctattatctccctacagcttcaacgccttcctatccatacccgataccctcttacgccaagtcgacttgtcaccgcaaccaccccaggcacccaacggtccgcctctcgatatacaccacgtcctcgaggcgtgggtgctccagcaacgccacatgtaatccgtgcccggcaacaacgagcggcgaatacccctggtcgggatcgccgacgaagcggcagagtgcagcgggagactacattcgatattcttagaaacctgggcaaaggtaagagcttcgccacgtatcattcgacatgagaactgaactaaaatacttgggttgtcctagcgctcgctcctgtatctcaacctatccgatcctcgccgcaggagaagccagagcctatagaggagccaattgatgaatttgaacagcttgataatgagccggaaatcgagcgaccacggttatcattgcctattcaagagtctgaggaagaaggcgatgaagtcagtcctgaaatgaaccccccgaggatgtctctcgccttcgcagaggaggatatggatatgacttaccggtctgtcgaataccctcgcgacgctagcgtcagagaccgggaccgtttatctatgatgagccgagctaccggaagaatcagtggagatttcgacgagacgagattagagagcgatgatgcagacgaaactggtattgtgggcgaggatgatgaggcagaggatacaatgatgagtgggggcgactttgatcgagggtaagaatacaagagttggattttctatgttacaagtaatggctaatatgacaaataggggagagacggaagacctaggtcgcttccactttgatcttaactttccatctcctgcagctgccccgcttgaatatcccgctgacgaagatatgaacgatatggagggtttcgaactgtccaccgcggagcaaccccaagctccatcagacgatgatgatgacgatgttggaggtgattttgggtttggactcgagttcccacccgcagcatcccccagtgagagccccggcatcgttggaggtggattgcgagatgaagctatcccagcccagagaaagcaaaagaagatttcacgacatggaattcctgtcccaaacttgcccgcaggtgtggtaaaaaagctagcgactcgcttcgcgcgttcgggggctggatcaagggcaaaaatcaacaaggccacactggccgccatcgagcaagcgtcctcttggtactttgagcaagcaagccaagatttggctgcgtattcaaagcatgcgggacggaagaccattgatgagagcgatgtcaccacattgctgaggaggtcagtttcaatggaagccaaccagcgcatgggagtaattgctgacttgttccaggcaacgccatattaacaaaacgaccacagtgttttcccttgcccagaagcatttacccaaagaacttcagcaagacatgagattgtccatgcctccatgaataacaaatttcccatgaaaagtaacgctttcaacgccaatgaattatgctaaggtaaagctggaatcccactagattaccagtttcggttctggcgaactcggcgcagtgcctcgttggggttcttccgtacaaccatccacatcatgatggtcgtggccaaagacaggccatacctgcaaagtatgagcgacaatctcgaatgggagggaaaagcacaacggatctaacttaccaggtgaagatgtattgagaatggttgtttctcaaattcacctccgcggcgcggccaatcgggatacccttagcctcgcgatcacaagactcgaggaagtcaggaactagaaacgcaaatcaatgttagccatgaatgagcaagattattcaatataggctcattacccattgtctgctcaatccaaacaggctggctcccgctcttctctgccatctgattgatatccgggaagtagaacttgccctcgtccggcttgttatccggcgtgaacatgtttttcttccatggctctcgtagtaaaccttccacggtcacctctccatccggtacacccaaaggtcggtccttttggtccttcaatttccttgagatccaaccccggttcacaagtacggtgctctgtccctctcgctcgaggggagtcactacgatgaacccgtcctctccttcgttcatgcgggggccaaccagcatttctttgtcatgacggaaatggccggtagcgtacacgcggcggtagtcgaactctgaaatggcatccgggtcgactcgcggcggcagtggcagaggaggtttcacgagacggtcctcgaatttggccattagtttggttttccagcccaaacgctgtacctgccatgttcccaggataaatgagattatagggatcagagctatagtgtagaacaatacgttagtaattatctctaaatatagcatttccgaggatatgtagcattgaacattaacatacccaagatgatcaggccaggtccatgtttcttattaacacgcacaagccgcgccgggtggtctacaatattcagaccatcggccagctggcgtgattgagagatatggcggaattggtgtaggcggtatttggcgcagagggaattgatcttggatggtacacgagggtttcgaagagcgcgagtcggaggcgtccaggccctcgcggatgtcttctgcaaagcagagaagattggccgcatgttgacagtttagaaacgcgaagaatgcactcttaattgacgttcggatggggttggagttgtcgtttctgcaaatgcgacggcagttgggaatttcgggatcggtgaccgcccaggcttctcctatcgacaacattgtatacttgtcactccgcactggcgcttagtcttcacggaatgcgattatgacgattttctacatcggaggtcttcaggagggcattagtgctgcagtaagagatgacaaagtggttacttgttttgttagaggtcgctgaatgttctccccgcatcgaatgacatgttgctgatcttgggacttgaacatatagatgacgaagagttgagctctgaatgggaggaggactattttggtgatgctgaggtatatatactcactaaaattgaatgtcgaacggtatctgattctctacaggtcgtacaagcactccatgccaactcgattgtattgcgcttgacagcgggttcacaggaagctgaactcctggcctctttctctccgatccagaaggtcccgagtgttatcgttatcaagtgcgttcaaccgtccaaggccttatggcaagtcgatattagtttgctgaccgcgttctagcaatggcaagaatcattatatcgagccagatatcacgaaggatgacttccgcactcgattgattgcagctttgaaaaaggaacagacaattcgtcctacacagcaagtacaaggtaatgatacacctacagcttcaacaaataatacgacggtgtcagtcgtgccacaaccccagcgtgaggcgccatccaatgccagcaattccacacaatccgcaaagaaagcaagtgaaattacaataaagaaacaatcaccgattggacaagtaccaaagaaagctgcggaacctgcaaagtcaacaagctctacatctcaaacatcatccaaagaagccagcaataaagactacaaaggcaaagcgccgatggggtctaagaatcccactgccaaaggtgtcgtaaagagtgaacaccaagagccaaagactatagtttctcggggacctccaaccgagtaccggctacaagtgcgcctgttcgatggaagctccgtgcggtctagcttcgcacccacccagagcatccgaaatgatgtacgagcttggcttgatgaaaagatggaaggcgacaaccgaccctacaacctcaaacacatcttaacccctttccctagcgaaactctttccgtcgcccaagaatcgcaaaccctccgcgacttaaatctcggttccactgcgaacctcgtcatgattcctgtatcaacatacacggaagcctattcggcagcgggtagcttgcccgcccgtagtgtctctgccatctacaacttggcctcttctgctgccagcactgcaacgggttttgtgggttcattccttggatatggcccaacggcaccagcaagcggtgcaaccacctcttcggcctctccggctactggcaactctcagcgtcctgggactacgggacccaatattcggacgctgagagaccagcaagatggacgtggggataaccagctctacaatgggaaccaggtatgtgattatgcgagatgagaatatcttgtccgggattggctaatgtctttctcagttgaatttcgagccacggaataacgaggatgacaaggataaatgagtcccagcggtattgcttcggtgttcttgcattatttatctatggcgttgatggatctgattagctcaccagcctctctatttaactatgacactgctattattcacattttggttactgcaaagttggcagtcacaataagtgatcttttccatgaagcctttactggtcctttccatcgtatttggtttttgatagaggtccaaacaatcatcagagaactacaaatattggagttcgttaaattcatgcattcgaattcttgattcagtagtcaggtatattgatccctttatcgaggagaggtggtataaagtacaaagaggggatatggaaatggctatgcaaaagaaagattggctcggttatggaacaagcccataaatctgtgaaccccatcacttattacgaagaatggtatctgtctttctgatcaaaaagggtcaaattggtatcaaccccttagtaaggcttagcggcagcctggcaagctttctgtggtacgattagtatgtattaaaaatgcaagaaaaaaaccgaagtgtaaacataccagctggtcaaggtaccaaccgcagatgctcaagttaccctggttctcatccatgcaagtgcggaagttgcggacgtcaacctcacaagcagggttctcgtacgaggtctgggcagcgttgctctggtagaggccgctgtccataccctggaactcagaaggagcaggagcctgctgggcctcagcgggggcgctggagccgcccccgaagaagccaccgatggcgtggccgatagaggagccgacggcaacaccactgcatcggaataaaccgttagcacatatttcgggagagtcgaatcccaacccgggtcttgtcggggaatggatcgcaaagccgaatctggaacttacgctgcggtcgaggccatctggccgaaaagtccagggccggcgctctgctgctgcatgggaggagcctgggcctggggaggttgagcggcggtcgagtgaggctgcgactgctgctgcgaaggagccgcgggccgagcaggagcggcggtaggacgacggggagcgctgcgcgcaggggcgggagcggaacgacgttgacgagccattttgttgtgtgtgggtttttttggaggaattagaaagggaggtgaagatatatgcaagttgggataagtatacggactagtggagaaagaagaagctagaagatgagtaagttcggccattgaggcaaactccgatgcaaaccgtggagttttctggacgttgattggctgacttcagtcacgtggatcggacatcacggtgccgattgcccggagcggagtcagcaacggggatactacgggaattactagcatgtgctattaaaagagcaaattatgtcataggaaggaccagtcggtttcatctgcttgtttgtgcatagagtatatcgcggagcttgttgcagctcccattccgaaagggtatcttgattcatggagacatacaagtctcgtacatagtacacagagccactcattgtggtctcaaaatggccgagacatccatctgaaggaagctcatggccgggcatgcttggcaaatcgattgctagattcgacaatgcataacgtgtcgacagaattccggtagtggtgaggcatagccaataatatgctttgggaatgcccggcagtccgttcttagggttcgaggcgcaagccggtccgtactgaattctcactaagatcggggtgcaatgcactgcactcattgcgcttttcgggccttccgagcctcctccttcttcagccgtcgctccttcttcttttctttcattgctgccgtgttgattttcctctccttctttgccttgctgtcttccaatttgtgttctcctttggatttcttttggctatccttctcggtcttttcggtgtggtttgtgtcaacccggggctctgctgctgttgcaaggtcgacgcccccttcagaatcgtcatcgtcagaatcgggttgcccgttcgtcgcgtcaatgctcttgagggcaaacatggctgctttgagctgggcacgggctcgctctttagcctgcttttctgcccgttctaagtcatacttatcattgccagcctgtaaaaatttgattaatcgccattctatacaatataataggttagtacttacaaggccgtgtttgatgaatctgctcgcagctcccttatcaagggtcatggggcgttcctcaggctcggtctccagtgccttgatcttttcaaagtactgcttcacacgagtcagttcccggaacactgggtgttgcttcgcatccacgccatgaagccgcagataagctgtcaaatttcattagtaagagtaaatttgtaaaatttgtagtgtgacgtacagaagattaacgattctagtgtgtaggtgatcaacacgtgaagttttgctttgtccataacaggcaatttgtttgagtttttgagaagtgtgctggtcaaaagaggctggagaacagcctccaagtcatcgacattatcatccagctgctcaagcagcggtagtaggtccgttggatccatgacagtgagatgtgatgtagatgagaaattgcttgatctaaaaaaataggacggattcaactgggcggtgaggggagcggtgtggattctggaccgatcatcatctgcgcaactaagatcgctgagaactcgtgcatatccaacaattggttgattgttacgagataggccttggtggacataccagtggctgggctcttgcctatttgacaatatccatgacataaggatcgatacctcaccaaacccatcgctctaacctcctccccgtcgacaaacacatacttgcaactcaatcggatatcccggggagtttttcctcaacattctcataatgcagtcgacatttcggcctcgaactttgtggcgaaccggcattcttggtacatgtgttcggtcccggttccaggtctatggtgtgccaaacacacgatttatctcaacatggagggaagagttgcatgaggtcaaccaggatacgaaagcccctctatcaggacgagttcacatcctcggaatgggtaatctaggttgcttctttgctcattctttagccacgagacggtcaccgccgcccatcacaatatgcttgcacaatgactatctctaccaggcctttgtccggaaaaggggacaaatttctgtcagcacacatggccttgacgatgtcagaacgggatttgatgttgaaacggtggacgaagaaggcagatggtatacaatgccgcctgttgacaaccggccctcgccattcaatccccagtctccgccggatagtggtcctatcgagtgtctaattatttgcaccaaggcgcatcacacggagcttgccattaaagatatcagccaccgcttgactaaagattcgaccatttgtcttgttcataatggcatgggtgtgctcgattctatcaatcaaaatgttttccccgatcccaacaatcgaccacattacatccaggcagtcttcagccatggtctgggtaggaacgactcgttcaagatttcgcatttgggagttgggaccacaatccttagcccagttggagatccaagcatccctcccacaaacccggaagctgaccagacgtgggcgccgtccacaaaatatcttctgcgcctcttgactctcactccgccattggtcgctgtggctgatacaccggcaggtctgttacaatatcaacttgaaaaattggcagtgaactgcgtcatcaatcccctgactgcactgagtgactgtaccaatggcgagatcttgtactcgttcagctttacccgtgtcatgcggctgctactctttgagatctccgccgtgatttgtgctcttcctgaattacaaggtatcccgggcatcgaagatcgcttctccccagaacgcctgcgtcgtttggtcgtgaacatcgcgagcaacacggccaagaatcacagttcaatgcagcaagatatcaaccaaaggagattgacagaaattgaatacttcaacggatggattgtacgtcgcggtgaagaactgggtatcaaatgcgcactcaactacatgatcaagcatttagtcgctgccaaagcagctacccatcggagccgagaagctggcgcgattcccctcgatctcgacaatgtcatctctaccaacgaacctcccatttaactgctccggactgccttcttctgtcaagtccttactctaccttggctccttgtcatatcgctgtgtgtgagcaggtcaaaggatttaacaacaatctaaattatttgcgggaactctatacagagacagttttggccgcatgatcgcagagctctttgatctgcttcaaccgtctcagcagcatctccgcttttgaacgatgtgcttgcactgtggtgtcgagttccatggtcttctgcagcgcagttatagttgcatctgcctctgccgcatatgtctgaatccacctcttgattgtggcctcggatcggctctcgtccaaaccctccgattggccttcaagaacatggttccgccaatccttctccttcatataactcagacatgcagcgacctctgtgcggtaacagggtccgtgtggagtgacttggtagttactagcgctgtgtcagtggaggactgtatatattgcgtagagaatgcgcattgtcatgtaaaatatcaatcaaaccacatacccatgatactgattcagccacaactcctcttgctgctcagcagtttgaatgtcccggaaaacaatatcatcaagatagatcgaatctgcttcattcacatcgaggaagaagccatctatagaaaggggagggatgaagtcagcacgccgaaggaaaaagaataacaacactttctcacattctgctagtaaagtatcattcggatgactaccatagttcatgaacacttcctcgccctcctcataatctttcgtagcgcgaaattcatatacactctcatcgaatctgacatcccgctgtttccatctagtgttagctttatcagtagtatggaattcagacgaagtacgtacagcaacatccgcatgattgaagtaatcagcaaatggcaccagccccatcgcatcattagggtcttccggcgtttcctggccctctccaatccaatagaagctcctcgtattcacgatcagccagttgtaggagaatgtctcccagttggtctccgggaaaacagaaatgacgtccgtccatgctttgcgcaggcgctgggcctgctgcgaaagaatgttctggtgatctgagctgtatttcctcgttttggggcctggctgtagagtattccagagacctgaaatggacggcgggagaagacttggctgcttcgagtctgtcgaggcgtcgtccttgctgttgggtaactgcggtcctcccaggacggttggccagaggatcggcatgctgtcttcgaagtcttttcggctgggccatgaattgcgccattggtcgtattttgatagttcatctggtgcagcgtgtgtgagatacgctgctagaagtgcttgtacggcaatgtcttctgggagtttgtcgataaaggcggaagggatatcttcggccctgagcatcaactgtgtcggcacttggaggacaatttctcctttctaaacatatacttagtgagcaaatttcaaatgagaagtagatatagattcgaaggctcatagtcatactttaatgttccgagtggccatcattcccaacccacgtccttgaaaccgggctggggtcaccgagttgatatctatgccattggagattgcccattcagtgaaggcctcatgctcttctccgggccaccattctggcttcatattggcttcttggcagattttgagatgcttcctccagtcagcatatactacaagacagggattgagttggagagatatacaattgttagaacacaccttcagagtagtctgttctattatctcctgttccttcaaaccaatagcctagaaagaatatttagtagtctcaatgggcgtcgatgtgtgtctgaaattcactctacactgtggagcagaaggttatcgataaaggcgttatcgcgaactacggcagggcacgacgaccactcgtgccgtccctgccgatctgataatcgtaccacttcggctttcacttcagctttcgtcccagacgatgcacaagttcctttagctttgggattcataatgtcagtacttgggaggcgtggagcaattgagcttcgagccttggctaccagcccaaatctatcagctgcaagcactttacggcccttttccgtgctgaaccgcccaccaccaaactaccccggccatgtcccattgaccactattgaacgcggtgctcttgctataggctcggcaattggatcccttatcaaccctagaagagcgggtgcgtggatataatttcctacataactggaatagaatcttggatcacgatctaatttggtactctatagatctcattgcggccttgggcgaagccaccgccacaccattcttcatatatcgactacgcgatgctatgctctcagatccaacagggcgccgcattctccgcgatcgtccccgcatcacctccgagaccctcaaaatgacctatctccgcaccctccccgagaactccgtcggccggacatacgctaaatggctagatcgcgagggcgtatcccccgacacccgagataacgtccagtatatcgacaatgaagaatgtgcatacgtcatgcagcgataccgcgagtgccatgacttctaccacgcagtgacgggtctacctatttttgtggagggcgagctcgctctcaaggcgctggagttcttgaatacacttttgccgatgacggggctgagtctatttgcctttgtacggatgaagcccgccgagaaagagcggttcctctcgttacatctcccgtgggctattcgcagtgggctggggagtaaggagcttatcaatgtttattgggaggaggtgttggagaaggatgtggacgagcttagagctgagctgaatattgagcgtccgccggatctaagagagattcggaagatgattcggcagcagcagaagcgggaaaaagagagacagcagcaggcttcgaactgagctgggttgcgtcctgtcggggcgatgaaatctcgaatatagggagagatgtatgattattgaatcgttgtagaccatatcaccgatgcgcagatgcgcaaatgcgaggctgattgccttgaattcaacccagctgcaaatgtagaagaaaggaccataacgcctggagtagattttcccagtggccacgagcggatagcaagagaggtatccgaatgcaataaacaaaagggccataggcacaagtgatcatcgatcacattttatgcgacccttacaggtccaagagatcatcatcgtcatcccatccacctttgcggcgagaaatgacaattttgtgctcctcctcttcttttcgctggttctctgcaacagcccctagcagctccttaagttgtgcctctgttaccttggaccgtaactgtccagactgggcgagcatgatgaggcggttctcgatatcggttgcgcgcgactccttaacgagacggatacggcctaggcgatcggcagcgtcggggtcgaggatttgtgtcaggatcgaagcgcgttgctcggctggaatgaatcaagatgggttagatgcggaaatataaggacgtcatcgaatggtctaaagggacataccctcggcttgtctagttgggttcattagcatacagcatcttcttgcgacttattccaacacttacctcctctgctgtgcctgctcaccaccatcctgaccggctggaccacctccacgtcctccttgttgctggagttgcgcgagacgagctcggcggatctgtttctctcttagtaccggagccggaggatgcagacctctcacatgctatggtgcaagactgacctcttctagctctgcgtctgccatggtggatattcaaatcaagtgaggggcttggagtgatcaagtgatgaggaatcaaggattaattcggtgtaccccacttgggctcgcctgagtacggaggggtgggacgaccatacttcaatgttctctggggtggttttgagatagttatacaacaatttgctaatatatttactggcagaaataggaattgaatactgaatgtcatggtggtcataattctacgacttgtatatgttcaactaccgtctatatatttagtatagttgtcttcaacttcaccctctatagtagataattataaatttaaacgccacaaaagataataatattaaatagagatacgtagaaataagcagtgaataacaacagaatcattcaacactatctacatcgtcgagtacatatattcaatgtcccctgggttcggagtaagtctcctattgtaccccgtacctggggaattaattacacgtgggactggaatgttttaaattcctccgtacaactacgcctatttgtacataaccattagtctatttctctaattggctggcttaatggcctaatatcttactatattcgcgtggtcaacgctatccggcatgttgtgcgtgataagaccttgaagagtacttttgtagacgcgtatcacacagccagccactaacaacacggtaaattgggatccattctactgcgccttgaggggcaaatctcaggaaaaaaaaagcaaaaggcttcagggttagctccaaataaatcccccgggggctatcagacgcgcccggggtgtccgtcgttccgtctcccggtggcaatgctggatttaccctcacggtggccttcccctcacgcccattttatatttcatattcatatacaagtcttcactccctgtacaagtgcatacgacgtaagcagtcgatctttcaatctttcaataagcccacccgtgctcggtccacgggttcatatccgggtgactaagcttcgattcgccctcgcgctgcaaccctgacttcctcgacatcctcaacaggctgatatttccgatcagacctgtttgtggcgattcaatccttttcttcactttcaaacacattcctttctgttgtgtcttcagccgtccgactctcctcactccgaattccggattccgctatcttttaccctatcacgtacccccgtggacctactcgcacgcgcgaactttcgattctaaaacctgtctttttggtgtggatggcgtggatagcatcttgtctaccaaagcttttctggacgtgatctcgattattgatcttgatctggcgacgagcgatccatttcttcccttacatcccgaacgccttctacgtcactcaccatggccgagtaagtatccatcaagatttccgcgacttcaattattgacgctttaggtggggcagtttaattgcctttcagacctcgcatcatagcttcttctccccatccaaaatgatctcgcgcaactcccataagaggtcgctctcctccgagcaccggtccttatctcctgaccgaaccgtcacgaaagccaagtccaccaccaatctctccgagatcgccgctgccaatgcagcacaaaactccggatattacgaaagcagttttagcacattgcaagacccgcgattgctgatcgggtcggaggtctcgcattcgacgtcatcgtctcaccacccggatctgagcaacgaagtagcggcattgtctgtgaaattgatccaggctatcaacaaccaaacaaaccttgacgataatctggtcgctactcggcaagagctagagctggctcagggcaaaattcaagctctggagtaccagaacgagaaatatcggcgagatattgataaccaaatctatataaagaaggtcgactctgatcgcgaaatttcgcaattacgagatgcattagctgaagaaacgaccctgcgtctcgccgctgaaaagggcaggaaaaatattgagcaagaagtggaaactctcactgcggctctttttgaagaagccaataaggtcggtaatctcctttaacgtatgcattttgtactaaattttaacgttactttagatggtagcttcggctaaaattgaccgagaggcggtggaaaagaagaatgagcagttgcgttcacaagtcaaagataccgagttgctcctggcatcgcatcaagaccagcttgccgagctcaagtctgtcatgcaaacgatgaatcttcacaaagatgacatggaaggacgtcccgctaacagtccatcgtctccggacgagtcacaagcgcaaggttctaaccaagacactgagtttgaacccgttcctatattgattggcaacccggaggagtttaccccgggtccttcctctagcttccctcatctcctccgcatggtatgtcgcgcggatttgcaggcttatgaggatttccgcgatttgctggtactctctcggagctcaaaacctcccagtcgtgctgccagtgggtcatatggaggcctcaacgtgatgggcctggcaagctttgcgagtggagggtctccatcgtcgacctcatcacctaccaaagggtttagctactcccctaatgggagcatatcttccacaacgggttcgggattttccttgaaggaaactcgcttctacaagcgggtgcttatggaggatatcgaacctacattgcgactagatctagcgccggggatttcttggttgacgcggcgtaccgttctaagtggtatctgcgaaggcagtctcgtcgtcgagccaatgcccacatcagctcagaaattcgagttcccctgctctgtctgtggtgaacgcagacccggcacgtctaatgcgagaacccatcgtttccgaacgtcagacagcgagactgctcaaaggtactcactttgcattctctgcttagaaagagtgcgctcatgttgcgagttcactggctacttgcgtctcatccttgatggacatcttcgggctggggataccgaagaagaaaaggaaatctgggatgagactatccgtctcagagagaggatgttctggtcccgcgtcggaggaggcatcattccattgggcaatcgcccaagcgaaccggaggtgccggccagcacagagcctaatactggcgtccaagacgatgccgaccagtatctctatcctgtggacgttacttatctcgagcccaggacagaaaaagtacccgttgctgatccaatcgcgccggaaacaccagttagagcatccactactgatcatataaccccccctgatctttctcgacctcaaagccctatgtatgacagggatgatgctgcttctttggatgacttgcaacgcaagcgactttctattgattcagcagcaagcgtttatgaagaagccagcactgacgtggatgccaataccacggcacctgcccccaacgaaccctcgattattcagagtcgagagacagacacagacatcgccaaacccaatggtttgagcgactctttacctcggttgatcacaagcgatcaacacgagtgagacgactacacgttttacacagcgtttaatgatccgcttaatgtcttcacccttcactacaccccttgacattgcgttcttcagtcacttaattttcttctatttcctccaggtcgttgataagacctgccttttggaaatgctgcttctgcttctgcttctgcttctacttctacttctacttctgcttctgcttctacttttacctctacctttaatgaccctttgggttacaccttgataatgttcctcatccgttctggctttttgggcatccttctcttcattttcggcagcatggcctactgtattattatcaacttttcgcttccaaccatgtatacataattatgcgttttgctttccccctttccctttttttttgcggacatttggaccaggtgcggcattgtggattttcactgtttctgttcttttttctcttttttctcctttttttctgtgcccacttttgattcgcggcaatgctggtttcgggacccattggtggaagttcggtgataaatgatagacgatttgaatcaaattgcatacaaagtcatatattctcttggaataatacacgtagaagatgcgagtaacgcatgccaattccagtcactaatgcctagaatcatcactacttcatacggaaatagacggatccaagtactaaataggagaacagcatggactagacaaagatgtttcatgaggttaagaataaaaaagcgctattgtacacaaataggaaaaaagaagctcatcatccagattccatccctcccaaactccacaaatggcagaaaagatagccttcgaaatagaaaacccgcgaaaacctcaatgcgaacgagaacatcccgtctgaactgtacgtagccggggaggatatcatttcttggcaagctggtgaatgtgtctgatctggtcttcgatattcatgctctgggggttgggagtggcgttcgggttctgtgggccagccgaggcatcgagacccgtagacagacgcttgcggcgagcttcctcctcggggtcgaggggagcagggtcgaagacgtcgctgcgctggctggcaagacgcttgaggttgttgaccacgtcgacggtggacagattggtggtggcactgcgggcttcggccttggcacgctgttctttccagcgcgggtcgagcagctcgatacggatgtgctcgtccagctcgttggagggcactttttggttgcagtaagggcagatccccatctgggcttgttgacggcgggcctgagcgcggggcacgtagtctgagcggatgcgcattggctgttggcctgcgggggcttgggctgctgcctgggcggcggcggcttggtcgcgcgcctgagtccgctcgcggatgcgctggtcttcggcagggttggtgaactgaccggctgcggggtagggtcctgcagggtagggcgcgactgcgggctggggggcgggctgagggacgggcattggtgctggtcgaactgggtaggcgttgtagtagacgggttcgtcaaggccattgggcatcgcttcatcgatacggagtgcgttgagggaaaaggacgctctctgctcgagggaggcggactgcaggtcattggcggaggtcggcggtggcaagtctgcgtggttgtcgtgctcggtgaattcaatagtctcgaccacgacgaagtcatgccagtcgatctgggcgtactcaatgcgttcctgttcactttgctgttccttctcttgcttctgttgacgttggtatttcacccattctgcgcgctgcttagcgcgctccatgacgtggaatttgttctttgcactttgttgcagctcttcgattctcttcgtggttgaagtcacgtcgtcgataccctcgtcgcgaagcaagatagtgtattggtcgaccaaacgcgtgaagaattggtagagactatgctgtgggcgcaagaagtcgaactgggaatttctggcctcgcgctgcgccagcgcggtcatgaatgacttcccccgcttcgcgacaaacatcgctgtgagcttcaccacctccaaatcctgcgcattgataataggcatgcgcgcagagaagtggaacggggatggttcaggtggtcctttgggcttttcgggttccgcagcggcgacagcctcgccagctcgtgctggtccgactcgacctgctctgtactcggcgatataccattgatagtatggctcgtaggcatctccagcattcaggaaagagaatttgtagttgttcctttccctctcgcggatacggtcttcgaagacacctttatggcgaacgacatagcttgctgtggtctcgatggctttgcgaatatccttgggaggaagaaccataccctctggaggcttgataaccccctcagacccctcagggcgaggtgtagttccattggatggctccatggtgaatggcaaggatatgaagagatagaggtctcgccagtaggaaagcaaatgatggatccaccatttcaccgccgtaaagagtggcattttgacggcggtgggagttttggcggtgtgtgttgtggcggggattggattgtggcgtgggctgtgggattgtggcgggtgcctcccgtgcacgcggccatgttcctgtgttctgcatttgtccacgggaatgtttactttctcttttttatagtcaattgatttctagatcatcttatatacatgtagatatctaaaagtatggtatttcaaatctacatgcgactggcgtactctgtagagcccgttaaaacactaggggctaaaaactaaggggctcacatgttgtcctccacagccgccgttgatctggcctcaaggcggaactgcacactgcacgctttcgtccatctgcgttcactccagttcttgattctcaactttttttttttctttcttactctctcttcaacagccaattttctttagtcttttacttcttccctgtcatggggcctttttcctcattattacacgatcattaattggtgtgctgtttgaagctattgaacggttgacagctcgaggtcgaacatagctcccgatagcatccactcgtccatcgaaccctgagaaacctctcattgacaattcaaactataactcaactacacgcaatcctcatatcgtttctcctcgacagtccgacttcgattcctactcccgcgccgttctcctgaaccgctgacgtcgtatcgaaacaatatgggccagaaagcgcaagacacgctggccgtgcggccacagagccgtggtaggcgctcgcccagtcgatcgcctaagcccaagaaccgcaagcctttggcggtgcctcagacgtatgcctcggagggagtgaagaacaatgacatcttcaaactccccggctcggactatagacttattgtactggtaactctgatcgccgcagctgttcgcctattcagaatctatcagcccaccagcgtggtcttcgatgaagtccagtacgttccgcccaagcttgtgttttcaatcggaataaaaacaaacagagactaatgattacgcgtgaacagcttcggtggatttgcttccaaatatatcaagggaaaattcttcatggacgtgcaccccccgctagctaaactgctgcttacgctggctggttggttggctgggttcgacggaaacttcgacttcaaggatattggcaaggattatttggagcccggtgttccttatgtggccatgcgcatgcttccagctattctgggtgtcctgactgtcccattgatgttcctcaccctcaaagttaccgggtgccgaacttcaacttcagtcctaggtgctggtcttgttatctttgacaacgctttggtcactcagtcccgtctgattctgctcgactccccactgattttctttaccgctctgacagctttggccttcagctgcttcaccaaccaacaagagcttggaccggcctatgccttccgtggcccgtggtggttctggctcgtgtgtaccggtctttctcttggcgcaaccctgagcgtgaagtgggttggcctcttcactatggcttgggttggatctctcacggctctccagttgtgggtactgttgggcgattctaaaaatgtcacaccggtatgggtttccaaattcagatcaagccgtgttctatgctaacagtaggattcttacagcgtctgtggttcaagcatttcttctctcgggtattctgtctcattgtcattcctctcggtttctacatggccatgtttgccatccactttacatgcttggttaaccccggagaaggtgacggcttcatgtcatcggaattccaggcaactttgaactcaaagtctatgcaagatgttcccgcagatgtctcatttggatccagggtcagcctccgccacctgaacacacagggcggctacctgcactcccaccctcatatgtacccaacaggtagcaagcagcagcagatcacgctctacccccacaaggatgagaacaacgagttcctcctggagaactcgactcagcctctaggaccctatggagaggtcgagggcccattcgcctgggataacctgactgctcctggtttcattgaggatggttcgattatcagactttaccatgtgatcactcaccgaagaattcactcgcatgacgagcgccctccggtgaccgaggccgactggcagtatgaggtctctgcctatggatacgaaggcttccctggtgatgccaacgacttatggagggttgagattgtgaagtccatgtccgagacccccgagtctaagaagcgcttgcggactatccagtccaagttcaagttggtgcacgtcatgactggttgtgtcctgttctcccacaaggtcaagcttccggactggggatacgagcagcaggaagtgacttgcgccaagggtggtactcttcccaatagcatttggtatattgagtccaaccagcatcccgctatggccccggacgccgagcgagtgaactaccggaatcccggattcttgggcaagttctgggaattgcagaaggtcatgtggaccacgaacgcaggcttagttgagtcccatgcctgggattctcgtccgccctcctggcctaccctccttcgtggcatcaacttctggggcaaagacaaccgccaaatttacctcctcggaaaccctcttatctggtggtcgaccactctggctatcggaatctatttcgtcttcaaggctctctccattgttcggtggcaacgaagttgtgatgactacaagcacacttcgttcaagcgctttgactacgaggttggcaccagcgttttgggttggttcttccactatttcccattctacctcatggcccgccagctcttcttgcatcactacctccctgccctttacttcgccattatggtcttctgccaagaatttgacttccttacaaaccgcattaagagcctggggcttgcgtcgaagcccttgatcggaaaggctctgatggcagtcttcctgggacttagcgttgttgtattcacgctctacgccccactcgtgtatggtaacccctggactagggatgcctgcaatcaggtgaagctgcttggatcctgggatttcgactgtaacacattccacaccgacgtaagtgttccggaatggaaacctcctcgacgaggttattgaacgaatcgacgagatcacgactgacataggcctttcgaactccactagttgagccagtacatcactcagtacgtgccgagcctatcccccgtggctgcctctacaaccgcagctcaagcaccacccccaccgccaccagtccaggctcaagagcctgcgcctgcgcctgcaggtgaggctgttcaagaatcagacccagcggccgtcaccgcgcccaagcttaagggctctgtggcgcgcgttgagtaccgcgaccaaaacggcaaagttcttgacgagaatcttgtagcctcgctccgagcagaaggtaaagtcaagttcgagactcgctatgaggctggtcatcctctggagaatgcccatgaggttcctatcgtcgatggccagctcgctcccccgcacccggatgtgcagggccagaatcccgagactgccagcgcgcccgaagacatcgtgccccctgagagccccgcatctgtggccgatggtaacgagcgctccgtcgagcagccaagctccatggaagccaaacctgccagcgagggcaatgatgcgactagctagtggccggaagataaaatgtaagaggagagtggattctgccatgtataatgagactccatagagtacttgtccatttctctagtcaatgttagcttttttttagtgttgccacaattgacagtaataatttttgctatataaaataatattaaaggtagtcagttagctggccaatctcagcgcttgtagctctggtttgtcaggtatggttctagattgctaattcaaccttgtaaccaagccagcaggatacggatctaacggaagaaagagacatattcccaattgactctttatctgaatacggatactatgcacaaatctcttgctatccaaatggcaagttcacgcagccctctcctctccccggtcttagtgtacagcagccggccgcgggaagcagcggttcgcttcattcgacttcttaaggcacttcttgtggctaatcaatagccgtttagtagtcccactcctccttgccgtacttgttgaaccgctcgtggaggtcctattagaaagaagctaatgtcagcatttactaccaaaacagcaacgcgatcacacatgacactttcaacaagttctgaagtgatccaaccaacgtatggcataaataagaagtatcagcgaattcatacctcgggcagggtgacattgggaacaatgacagtgttcatggcgctgggggcagcacggaggggctggttcttgtcgtcgtgggggtggtactggtacttgtagaccttgccatcctcggactggccctgccagggcatggcactctcgccaatgcgaacgttgctctcagaggtcacggaggtgggcttgcggccgaagtacctatattatcgcaaataccgaactgattagcgaccgtggtgattattgtatgtgtatgcgccattgagagtgataggtaggtgaggtaaaccccaaaagaggtgccgacgtcacagtggcggaaatggggcgacccagggacgaggcattgtagggcaatttcgggagggatgctcaccatccggcaatcaggaaagcaccagacatgacaccgagaaggacctagaagtacagcagttaggacgaaagatcgagcatggttcaatggctccgtgggatccgtacgtagagctcgggatcacgcttgccggccttttcgaggttgccctcctcgaccttggcggagctgaagcggcgcgggggagcgcggaggagggactggcgggtcagagcccggcgggtagccagagcagcaattgaggacatggttgcagcaattcgagcgtgcgttggaaggataattcgtgggcagagaactggagacgggatagtgggagagaatcatgaacgtcgaatgatgttgccggaatatcaggtgacgctgagtcagcaccggttcaagcaatatgggtcacgactttcgagcttcctgttggttgatattctatggttcaagttatctgacttgctgacgcataaacgatcattcggtgttgattctgtgatgtaattggccttgacgatttgtttggcctctcgatcgctgtttatgcctgaggtatggtgttccggttctttccatcaggggctctgtcttggccccggctttgcggcgcgtttgttaatttgagcctaatgggattataggaccttgattaatccgtctattcacttcgctcattagttagacattgtctcggctccatcgtcactcctttctcagctccgcgcgctgctcaccgtatcccgtcgatattaactgcctacgttacaccgcaattcgcttccatcccttcgccgttgccaattaggaacacaatatgatagcgtgcatttacatctagcaatttttaatattcacatcctttcatggccatggaaaactccgcagatcgtccagagaccggcgacacaaaccaaggatcgataccgcaacatgtactagggattcctcgccctccctctgttggcggaatttcgtcccgagtgacagatgaagatggagagcgaacaccatcttacacatcacctacccagtcgcggttctctgctacctccaggcgtgctcctccagtgcggaactccatcaatgcacccagccaggtgaccagcaggcctggtagctcgggcagtcgtttgagtagaacacatataccgtccctgacggcacaggggttttttcggcccatgagctcgcaacgattgcaggcacaccgaggaacacgccctgcgactaaagggacgatttcatccaccgacgactggacagagcatggaagccagaacaggaggagcttaatctctaatactagcacagccccgcaagtctctcagcttccggctgatatggaagctcctccgtctcggggaacagagttcacagattctatcattccagaccgcaacacctccaacgctagccctgccggtaacacaaccatccgcagtctgggtgaaagcgtccgactgctgcgggatcgagatcaaaaggagaagccccagcgtctcaacctgggtgctaactatacagggaatgccgggcaggaggcaccgccaaaatcacccctttcattcctatcattgcaaaataggggcgccggacacaaccacgattctcgggctcatcaaggccacgaacatctttcctccgctggctcctctccgggttccattgacctgaaaaaaccccctctacaaaaaacgaatttgggcaagaattaccagtacttccttggcaacacattcttctgcggcggagggcggttccagaactcgagagacaagcctgtcaatattgcaacagggcttctaatcgttgtaccatcggcactgttctttggcttctcgtacgtgaattcgcttgatgtgaccactgggccactagctaacctctgaaatcagggctccctggctgtggcataatatctctcctgccattcccatagtgtttgcttacattttctacgtgtgtttctcgtcatttgttcatgcgtccgttgtcgaccctggagtaagtgactcgttcttgattgggtttggtgatcgctaacatgatatttccagattatgcctcggaatgtacatcctatgcctcaaccacattcttcggacgatcctctggcgcctggtccgccgacaaatgactgggtcatggtcaagcttgctacttccgatgtagctgccatggacgtgcctgtgaaatactgcaagacatgtaatatctggcggcctcctcgctgctatcactgccgtgtctgcaacaactgtgtggaaaccctcgaccatcactgcgtgtggcttaacaattgtgttggtcgccgaaattatcgctatttcttcactttcgtcagctcttcaaccctcttggctctctttttgatcggtgctagtctggcacatatattggtctacagatctcgggagagcatatcatttggggctgcaatctctaaatggagagtcccatgggccatggtgatttatgggttggttgcagtgccataccctacatcgctttgggcatatcatctcttcctagttggtcgcggcgaaactaccagagaatatctcaactcgcacaagtttgccaagactgaccgacaccgaccattcacccaaggaaacatcctcaggaattggattgctgttcttgggcgtcctcgccctcctacctacatgcaattcaagcagcggtatgaagacggtgaccaacgcttagactctcaaaagagcaaatatcgcgtcccggatgtcgagtcccaaggtattgagatggaacaagttggtccccaacaggattaaaacaaaaagtcgtttttttgcctgtcggccttgtttcgacggctacgatctgtgaagatgatatttatgatttcctcttttttgcttcccaataattcctgttcttactcataccagcgcatctatcactttctaatcactacattacacatacccttcttgtcgccatccctctttgttcaatttgctatacctagcgcagacataattctctcattctactgatctatgacgatctatttcttatcatgttatatgctgttacttgttgtgactacatacctgggaatcggtaaccctatccagaattagcctttactttccacgtcctattaggactatatattcaccgttgcttggacatttgatatcatccagtgtatgtcacggctagaataacagtccatatatccatatcatcccagacatagattctctcatgttcatgtgggggcgagagggagcgatttcggcattcggcacaagatctagcattgtaagccctggaagatgcttactcttcccttctcccttatcccttgctttcttattcttcttattgcggtaatattcttgtacgttgggacattctacgattggagtgttcgaaagggttgttgcacgcgtcagactctcgccctaaattgataagaagcgcggcgcgggaagctgatcctcttcgatccaccatcttcccctggtattaccccaaccactttgaccacacgcggcagttgttctacatcgatagagaaagggcggttccaggtggaattgtccttcttgttatcccatcctctccaaaatggcgccacgaacgtcccgatcaaccgcgtccgcagctcccgatgcccaggctcacgagcctactgaagacaacatgagtctcgacgtgccagaacaactattgacgcctgaaaacagccgctcggagacttcaagcaacaacgagaacgcgctgaccgacgaaacatccgcaggacggcgaaggtcaacacgggttactcgcgcatcgtcgcggccgagtgagccactggaggacacacctgagaacgaggaacccgcagcctcatctagcgaggcctatgtcgacagtcttgccaaggcgaaacgctcgcactcttctttacgccacagtattgcagtaatggaatcttccttgcggagcggaaccccagtcaacgatgatactgcggccgacagaactatggcccccgacacgcctgtctcgaggtcttcccagggcttgcaatccgaggatatgaatatggcgcttcagcagcggacgctacgaaaccgtgtggggaaggaattggtcgaagacgaaggaacgaccacggccgaactagtcccatcccgaacctctccgcgcaaatctctacgacggtcaggtcgcttcgatttattgaataaggcttcagatttggtcctccgggccagcagcatactgggaaagcgcacgagaagccagacagacaaggatctcgatcggcgtagcagtctccgctctcgcaatattgtcccgtcgaaagatgaaacggctctttcgacagccaacgggccagcatcgaagaagcgtcgggtatctgagagcgacttgtccaaactccgggatcaggatagttctgaagaggaaccggctgtgcctgcttcgtcgcgacctaggcgcaagatatggctatcacatggcctctatacaggacaggaaccctcagactcgcctcctaagcagcgtcggagtaagaattcgaagaaaactggaacgggtcccatgcatcgcaccatccttcctatgcctatgttcaaaggtgctcggcttttgaagactggacgggactacctgctgccgtttgatatcttttcaccactaccacctggccagcctaagcctgatgagtggcgcaagactaacaagagtgagtgacgagtatcctacatcatgaagtgagggctgacagacagtctagatgtttttgttggtgatgccggaagcttctggaaagccaacaaaaaactcgagctgtctacttgtatgtgtaccgaagacactggctgtgatgataactgccagaaccgctatatgttctacgagtgtgacaacggtaactgcaggctgggtcccgagtgcggtaaccgaaatttcgagggccttaagcaccggaccaaggccgggggcaagtataacattggagtcgaagttatcaagacagcagatcgcgggtatggcgttcgcagcaatcgttccttcgagcccaaccagattatcgtggagtacaccggcgagattcttacccagcttgagtgcgagaggaggatgagaacagtatacaaaaacaatgaggtacgtgccctttctgttgggctttactacttactgacatcgtgaactagtgttactatctcatgtattttgatcagaatatgatcattgatgctactcgcggttctattgctcgctttgttaaccatgcctgtgagccaaactgccgtatggagaagtggactgtcggtggcaagccacgcatggcacttttcgctggggatcgaggagtctcgacaggggaggaattgagctatgactacaactttgagtgcgtattacatgcatatcaagctacttgaccatgcgctaacgatgtaccagtccttactctagcaagaatgttcaacaatgccgctgtggatcagcgaactgtcgaggcttccttggtccccgactaaaggataagcagcaacgtgccaaagaactcgagaaacgaaaggccgagggaattcagcaggcaactacaaaaaaggtcatcgataagaagcgcaaggcctcagaagaagtcgaaagcgatgactcccatcaaggtaaaaagcgcaagatgaccaagtccaaggccatcaaggccggcgtgaaaaaggccatggctaccgttcgtgggaagaaaacaaccaagacaacggcaaaatccaaaagcacaaccactgtcaagtcgaagaccaacgtcaagctaccaaccgtgaaagctacaggccggatgaaggccactgttcgctcttcccggtctaacaaagcagccaaggaacccccggcttctcccaagagaacatcccaactcaagaggccttctgctgagactaagaagcaaatcctcgctgctgcttccaaaggctctggggcttctccccgcaaatctgcgaaaaaggcccctacccagagccccgtcaaagctaagaagcctgctcctaaggctaagagcactagcaaagggagatttggcaagggagtcaaatctgcggctcgccgtgttatgaagtcagtgaagggagcaaggaaatgattgatctctggtcagactacggtcgttattgctgttacggacttgcttgaaagaaccgaattatttgcgcaacacatttttgctgtctggaatcctaggtctgtattctttgttgaccttaatacttgccagtgatccattcgttctattctatttgataattttctggtaatttattctttctatggctaaaattcgggttggcaatggtccccttgctcgacatcgtgtcttccctttgcttcctttcgatttccctgtgcgttttatttactatggcttcatgattccttcggtcttcatttatgcgtcacggttatgaaagtgagagattctgatatagccagggtaagatgcctctgaattcaacatggtttcccctggaactctagtactccatagctcattggatgcatttgtccatgtttctttccccaagagctgtcaactgcaagactattcaaaatcctacaactatcgagattcagatcaccctacgatatgaccctactcatctatcctagccaataaatcgtatagtgtaaaaggttagatcatcagaccaaatctattggcaaattgaaactatctaaaccaggggaatccatagaaaaagaaaagaaaaagcccacgagttaaaagccagcactttgttctatgtgcggcaaaacattaatcgactccaacaagcctcgcgcaagctgagaaattttaaatacgctccaggaagccctggctctccaagatgaggatgatctcgtgcacaatgctgcgcacactctgcttggagaagtcgacaacgagatcagccttgtcgggagtctcgtaagggtcatcaacaccagtgaagcccttgatttcaccacgacgggcagcatcgtagatgccgcgcttgtcggacttctcgcagtactcgaggggagtggcaacgtgcaccaagaagaaggagccagcctgggagacggcgtcgcgcgcgaacttgcgggactcctcgtaaggagcaatgggggaggcgatgacagcggcaccggcacgggtcagctcggtggccacgaaggcaatgcgctggatgttggtgtggcggtcctcgcgggtgaagcccagctcggaggagagctcgtggcggacggtgtcacccagcaacagggagacggaacgaccaccctgctggttcagggtaacctgcaaagcacgggcgatagcgtccttgccggagttcatgtagccagtcaggaagatggtgaaaccctgggtggcgcgaggtgggttggactcgcgcagaattttgacaacctcggggtaagagaaccactcgggaatatgggcaccggagcgcagacgacggcggagctcggtaccggagatgttgagggtcttgacgccagcggggacctggtcaacggggcggtactcgtcggtatcggggaggtaggtgaccatctggaattcgacaacctcgatgccgagctcatccttgtacttctcgacggcgtgttgagcatcgtagggaccgtagaaatcctcgcccttggagttggaaccaggaccggcgtggtcacgaccaacaatgaagtgggtagcaccatggttcttgcggatgatggcgtgccagatggcctcacggggaccacccatacgcatggccagaccgaggagacccaggacggccatgccgttggggtaacggggaaggagcgcctcgtatgcgcggacacgggtgaagtggtcaatgtcaccgggcttggtcagaccgacaacagggtgaatcaggacattggcctggcgggaacgagccgcgcggacagtcagctcacggtgagcacggtgcatggggttacgggtctggaaagcgacgacgcgggaccagcccagtttgtcgaagtggacgcgcaactctgcgggggtgtctgtggaaggattcattagccagattcaagatcaggatgaagaattgaacatacagcggagggcgacatagtcgtagtggttcagcttgttgacagcctcgatctttccaccaatgtagaactcctcgacggagttgttcaaatacacgatagccgggtgctctgggtcaccgccgaagacaagcttagcctctctagtcctaaattggagaaccgcgtcagcgagccccactatagcacgaaccacatcgactcattgggtaaagattgaagttttgtgacatcaaatggtcatgataaagataaaacagggtatccgaggagaaataacgatcgacagtgcgaccggtttcggcaaattgtgaaagagaaagggaaaactcacttgtcggggcggtaaatgtcatcaatggtgagaatagccaagttacggtcgtcacggaagtcacgcagagtgatgcgagtaccggcttggagcttgttctcttcgataacctttttgctagcgtcaagggtaatgggcatagagaaaacattgccatcggcaaggcggttgtcctcacagacactatgcacattgtcagctgctgctgttgtatattgtcgtgcagaatgaggggtttctcattccaatgggatcatctgtatcaaacataccggtcgtagtctgcctggttcatgaaacctgcacgaaaattagtgattgtcctctatgcgcatgttcaaagagaaaggtcatttgaatctgagaatgaacaatcgcacttaccctccagaggagagaaacctccgttcatgatcagctcgagatcgcacagctggcgctcggtcagcgtcacagcggggagagtctcggcctcggcggcgagctcggcgtgacggggagcatcgcgagcgagaaggtccttgaggacaccaccgtggggggcgttggccataatgaataataaagaacgaaagatggaatatgaagagaagtaatgtacaagaaaagaaaagagggaaagggtttggttatcaagaaatttcgagtatggaggggtgtggattgcaccatccacatccaacagaagtcgtcaacaagtggagaccggtggaagtcttggcttcggggtacaggaagttgtttgtgctgttgttatggattttatatggatcttagggctattagggctattattatcttgtgtcgaatgccttattcagataattagcactatacaacatatatgtctttctattttagtagtataagggtataattctgatattctgatcatccgaagaccgatctacaacgttgtataactattgtacgtactgcagtttcagattgtcagattttcaggggcaatagacacccctagaacccctgactgatatcatagaggctttgcttctaaagaaagatcttgtaccccgtagtacgtaggagtacacgtacacttagtatacaaccgatatacctaacgctatccggaagtccaaaagcggcttagctcgacgccacatctgcagaggctgaggtcatgtgaccaagcacgtcacctccgcgcggaatcacgacatcccatcccccaattaggaatagatcgcccgggtgatctgaaaaccctaaatccggctagaattccattaatatacaacgccaataacccgatatattaaaactatggacactatatacatctttccctacatattttcactccgccttcaccgtgctattgggaagtgtgatggtcaatttctcgaaatccacagcaaacgcccctaccttcatggccggctgagtcgcgttcgcataggaatcggccaggtattcttcgatgtcctcctccgaggacagagcggtgtcaagcgagcctgtcttctgcagaatatacaacaccgcaattcgagaaaacccaacaaccttatcgggaacgctgatcgcagtggatgtggaggcagcagcagcagtggtttgagagctggccttggtagcggaggcgctcgtcgcagactcggtttgagtgggtgccgacgtggttgtagctgtcttgcttgattccgagtcgtcgtataggataccgttcatggtggcttcggaacggacagccaggactggtgttgggtcggttttcgacacggatggcatcgaatcggctaccaaattcacagatcgtcgggtcttgcttgtgtcggttgtgacagcgctgaaagctacgagcgcgttttcggtcgtgcaggtgacgtcgttcatgttgaacagagccatgattgtgactgggtcgagggtgatgttgaatttctccttggattcgttgaacagaacaggaagtgcactgcccatggtcgcgttcgatccgtcacttatcagggcggtggtgcagctaccgtcacccaaaacggtgcactgtgagccgatataaccgttcgaacaaatgcacgagcattgggtgccggctgagacgcttacacctccgttttcacaagggttcttttcagcacagggcgtgctcgcattctcgcggggcacggcgacaaggaacacggggagaagaactgccagaatgacaatgatgaagattacgacacagatgagcacgaagatcttccgaggtattccacagcatgtcttcttgcgtcggggagcattagggtcgtcgtcgctcgagttaagctgctcgacattacgcaagttagagcgtccaaagaacacgggccatgatgcggttgatccgcgcgcttcgggtgtcgccaaacccggcgggggaaaggaggcaagcatttccgataaagagccagaattacgtggtcggtgtcctaagcataacagcagttagtactattttcggtttccacatagcctggatccgaaagactcacccatccctttgaatccagcctcatcaccagccagattggctcggctggcggttctcccatgatccaggttcgatgcgagctttgtcgccctccgaatcaaatcagataaactggaaagactcccacgagcctctgcatcccgcaacgcatgcatattcagagcaggaggcttgcgaccgccaggcctcttgtcactcattgttggtgcagcgttgggcagctgtccgaaggcctcgagctctttttcgagttgtgcattggaggagagcgattcatgctttgtggacaagggaggtttttctaagttcaggcctttcggtggttcactcgatgtagtagacgactttcgtaattggcttggtatatggggcgcctggcttgcagcagctcccagcccgacagaccgcgccgtggtgcccttggcggattcctcctgggtaggtgctggcatgtctacaacggaaacagggttagacttgaggatagtacgcatcgtcggctttcctcgctttccaatactggcatttcggacaagcctcgtatcgtcctcttggaagccaggtgagcgctggccatcgtctgaatctatgtcgtatgctcccagaatctcggattcagcgggaccggatccccagcttgggatggctcggctcgatgcgacggagcattttgtaaaccgaggatgggcgagttcttctggaatgggcgaaacagatgatcgacgagcccgagggggccgtcgcgaattcagcggtgcgacaagacctgccgtccggtgtctaggctcatcctgagaaagatcggactcggctggcagagaagtgggtggaaattggggcatatcggaggctacagattgcctgaacaaatcttccgttgcgatcgatattcgaggagtcaggtcgattgtgctggtgggactggcaggggtattatctatcggccggtgagactgcgctagcgcagaaggctgaggttgcgaggaggaccggggaggtaatcccatttctgaaactcggctatctcgttctgagtaaatggatggcgaaggcatttcacccggatgaggtggtctctgaggtggaggaccacgcggaaccaaatacctaggatgttgattggccgggtgtggtgggagacctgtatcaggaagaggccattgtgcctggtgggagatattcctagggacgggaggttgtctcatctggggtggcgaggctctttctggacgcacgccggcatctagcatttgcctggcccgtttgacggatcctttcctggcaggctcgccagagggcccggagtttggtaagtcagtgctcattgagaagtatggctaacctctcacgagaagttagggctcgcagtgtaggaagtgtggcgtggtactgctgtccaaaagagagacttgtctcttaaatattgaatgataatgaatgattgctcgatgccttgatcgagctgaaaaaaaaaaaaaaaaaaaacgaatgaaaagatatcaaaaggattgaaaccagagaaccggggtctggccactgagcaagtgtctacaagattgtagagagtggataaagcaatgagaacgatctagcaaggcgagatccacaggatcaagatcgcaaacgaatggaagggcattcaatgccactgtataaaatcgtcagggccagcttcaagtcatcgtgaattggattcggaagacttaccgttgaaaaaggggactgggaaaacgagaggaaccgctagtatcaaactggcgttcaaggatagattagccccagtctttgacctggatagactaccaattcaaatggggagagcctcaagctcttctaagggtgggaaaaaggagagaaaagaggcattgaaactgacacgaccagggctatggaagctagtccacatctcaaacgggaagtatattaaggctaaacctcacggattaatctattcttccttgatttcgtgcacttccctgtcgtataagagtacgaagttgcatatatccaaagactacgtagtccatgcatcctgcatacttccaacccccttctgatctgcatagcacacatgtcgcttttcagcattgtacttttgtagcgaaaagtagggaaaattggaatgaaaggtcaaccccctcaacatgagacggccaaattactccgtagacgaatcacatctcgactgtatcagtggggttggtattagtcccggacgctaacgtctcatataaaggctcccttaagtaatttgaaacttgttcaatgagttattgaatatgttatagcacatttatatccatgcattgcatattgtatactccataggcttatagactccatagcacatgggactaaaagacgttgaatgcaaaattaaaggtgcagggcggctataaactccgtactttgatagactaggctttgcactgaaacacctttagccctacttggtattagccatttacagccccttaaatgaataatttattgtacgatagatatttctccgctcgagtctatgcatccacagtggcctggtctgggcccttccacatgaacagttcatcatgaggatatattgtacatggtttcctgagttcaacttttagatatgaggcatttgcgactcccaattttaattacatctggtcatacaaggtgatctccttggaaccgcaacaatataatgctttgtgcgacctgtcaaccaacttgaccttgcgacgacggatcaaccgtgcaatatcggacaaagtcacggatacctacaacatagtcgcatcgggggattcgatttccagccgagcccgtaattcgcttatctgctgttccagcgctcgcatttcgaccgttgtactagccaaatccggcacctgattgtctatcgcatttgcgaaagagtcctgcgccctgcgcagcgactgggggaccaatattccataccaatgaattggatcagtagaacgaaacttcttaggagcgcgctctggtttctcgacaggggtgatttcggtttctgcagtgtcagagggttccgagctagccgtctcagccgggctggtttcctcatgtccactctggaccggagaagaagctttggtctcgttatccccatcagcctcctctagtggatcactggttgtacttttgatggagaatgtgtatccaggttcaggtggcacagtgatatcccctttctcttgtggatcgttcgtgggtttctccgtgtcttgttcggattggattgatctgtcaatttggcccagttaacaagcgccaggaatcaatgacagcaggtgaagttacatctttctcgttgctttcatgcgcccatcgtaataatcaggaccataacggcggccaggaggactagagaagttggcctgggcgagagcaaagaacccctactttgtctcagcatatttcatgaaccatgattgacagcgtcataccgacgacagatggcctgccagacttgactgtagtttctgctgccgatcaagcagatgcaagtatttctcaaggagtgtatccaaacattggactgaatcctccaaagctacaggtttcacctgcacttcgggtgcctccgagcccggtcgcgacgctggtggcgtgggtatttgagccatggagaaaagactaaaggccaatgaagcagatatgcaatgcaaatatccacaaaaccgagtgacttgacaataagtccgataaatcccaaaagcttgagatacagaagaaacgtggagcaaaggagctcggccccggtaactccgtcattcgtctccgaacccaaaagaatttcccatttctgcgcttcttcttctctcttgcatacttcaacccactgtatctcttgtgttgtaagagactgtgctactattgatcaaacccatcgattcctgtgcgatttaatttcccccgaatctttgttcttgcaagatcgaaccgccaccctccgattgcgtttttgatacgagtcattgcgcccaacgtacgtgaactacactctggtatctcgaccattgcaatacgaacggtcgctctaacccagcagctcttaggaccacttcttgccgccgcagcgccgtgtcgaccacgcgaccaaggcatcggtgataacctgggttgaccaagcaggcgtcttgcactactcacattcggctttttgactctgattaccacttggatcctcttcaaaatattatcataacttcagctaccatgtctgtcgcgtccctgcaccgtgagactgccttccaggcacggtctttggtatgtcctcttgactttatatgcgcttcaacctcttgtgtttgtccttgatgcatcaaactaacgagcgtctttctcttttcattagttccgctcccttctgcgctattccggacagttttccaactacaacttccgtgaattcgctcgtcggaagacaagggattcgttccgcgagcaccaaaacgccacagaggaacgccagatacaggaactgatccaggagggacttaagagcttgcgcatgctgaaggtcagtggtgttacatggctttctcggggtgaaactcggtcggtggcagatatcggggatccatcctcagccccgcatattgaaagtcgacgagtcctcatcctaccacactgccctacaaatcatcggatccaaatcttgggaataatatactgacatagccacagagacaaacgatcatcagccagttctaccagttggataagttggtggtggaaggccagaagacagtaagttctaccttggcttaaggccttcctccagcactcaaacttacattctctttgaagggaaaggaaaccgggaaccatggaggtattgtccgccagaaggatactgggtaagtcattcaaatgaagctccaacccaccttctgcatgtcactgacttgtagtagttgggattgattcttagacgttggatgggaacttgttattattccattgtgttttttcgataacttgccactggtggactaattaaacacctgctcttttttgtatttatacacccagcgatgcagctgcagctgtagctattcttttatcaagcaccagaaacacccattccactcctgaatcacaaaataaatcgcttttacttgaacaatttgctttatatcaattgagggacactgtcacaatatagatagctgccatagcaagatattgcatcaatgttcaataagtatgcatcacgtgatatctctttacggttctgtagcatcgcaacgcgacttgaggtgcactgcactgtaccaccacacactccatcacatcgcgctaaagaatcctgcccaggaggtcgccataaggacattacaagctttctgatcgggtgcacttgcctttgaatttgtataggggcatctgccatgccttccacggtacgtttcaacttgcccccgtggtgatctagcgccgacctggttgccctagacacatggtcattccagatactagatcttaaaattctcgaattagctagctaaaatccaccacagttcagagcctcgcgctcagggcgacacctcgatggtgccccaaaccgcacccgaaccggccaaatcgatcacgatgtctttgagggattgccagtgcgtcgctggtcccgacaacagcacactttctctcaagcgcctaaacctgttgagtcggaattcgccgttcaaggtccaggcggcgggccaacgctaccagagctccccatgccaagagacagccagctcctaccgccaatcagtcgcgcactccttcgagcagcccgtgctggatgtatccatatcctccaaggtagtcgaacagaggatgaggataaaagcggagaagatgcggatgattcggcctccgcatctcatgtggctgatcggagcttcacaactcgcaaatggatgacgcttcccaagcacctcgagcctgcggaggtggagtttctggcaaagaggcgacctggtctttcatctctttatggcaccgttactactatagatggaagctccgggcccatgaggagaacaaaattcaagaaagttgatccccaaacaggcaacatctctatctacgaggcgtgggtgcctgagggccatcgcattgaaggagagattactggcgacttacagacatttgccgagcagagcaatgtgcctgtgaagcccgaggcgcctgcacctggaacaatcgtcgagggggtcggcattgtcaatgctgagggtgttgttgttgcggaggctggatcagcagctgtaatgactcctccaaaacgacgtccacctccacctaagcgaaagggcaagggtattggaaggggccggaagaagaaggtcatgtttgcgcctggcgaagggtctgatgccgcgacagtacatggagctggcccctctcatggcaatggggagggtgactacaagagagaaggtcagcaggatgcttcacgtatgtccattgaccaggctggtcaagatgaagacgatgaagatggtgacgagggagatgacagcgatgacggtgatgattcgatgatggatgcgaagacccctgatacaccccagcctctgtctggcgctgagtttgtgaatcagccttcattcgagactcctgccaagcaatcggttgatgtcgacatgtctgatgttgttcccgaaaaccagccccatgcccctgaaattccttcattaagcgaaaaggacgagcaaaaccagcccgaaaacacctcggaggtggatttcggtgccctgacttccaacgttccctcagagaaggcggaggtcaacgcttccgatgagaagcctgtcatttcggagcatgacaagactcccacttctcccaccacaactgccgcaacgacaagtgaatctaccgagctcccagctgcagttgccgaagctcaaagctcagatatcaaggtggaaggaggagaagaagccacagagccgacggctgaccttgcaccaaaggaggaacctgctctttcaaaccaacaggaaattgcgactaccgtgccacctgttgaccccgaaattccctcggaacccccagtagcacgaccttcgacccaattgcagacacttgagcatacagaaaccgagcagacggcagtatcgaacaatgccttggatgaggctcaggaacctcaacagatcccagacgagtccgtttccaatactgacacacaagaaacgctctcgatagctcctgatcgtgaacaaccgaacacctgcgatgctttcgggcccagtctacacccagacgaaacaaaagacgtcgcgatgggagatgccccgtcaccagaacaaagccaagggctcaatgcccagtctctcgcgaacccagaagtacctgaagcgccagagaccgaagagcatccacagtccaagcccactgcagcggagcccactgcagccattaccgcagacttcagtctattgaagagatcaacgcctgccgtagacgaagagtcagaaacagcaaccgaaacaagtgttcgtgatgaaactcttgccaccaaagcagagctgcaggaagattctcgatctggcgaagctaaggaagcccatgacgaacttgagaaactacctacgatcccacaggctggttcgtctgagtctacatgagccacttgtgagggctttattttctcccagccaactaatgtacaatgaatggcattggttttgtttattgcctgttgatgggattgtttatgtttgtggataggcgtataggatcattgtgcatcatattgtaggaccacatagtttattcttcaattcaaatcttttcttcgaagtgactccgtttactcgtgcttttttctctgttcttttgtacaatagacgcttatcttagggatgctgggtatgaatatataaattacagcatacatatagagatgagaagaaagtagcaagtattatttctccatatggcgaaattagcgaaggagaattagttacttcaaagcaaagccaaccctacaaaagtttcttcggaaaagaaaaactaccaggcaagttgctgaatatccttcgagatctgccatccatgcgccaatgcaactcttctgtaggcgtctactgcttcgcctactgaatagtcggtttttgcgctatggatatccagacgcgcgggtcttgggtcggtgctggtaatagccatgcgaacctgcaacaacaaactctcaattgaagtcgttggtagccagcccgagtgtgtcagcagttccatgcacatagatccaccggcggtaacgtggccgccgccccccgcggcggactggaggnnnnnnnnnnnnnnnnnnnnnnnnnnnnnnnnnnnnnnnnnnnnnnnnnnnnnnnnnnnnnnnnnnnnnnnnnnnnnnnnnnnnnnnnccggccgcctccagcggcgaactggaggaaacgagggcgaatgacccgtacaaggggtggatccatagggaattgccggggaaagcggagctccaagacgatgcttttttgtttggtctctttgaggtcttttgctagtgggagggatggatcaaacgtatgcagctctgcaatccattggtagactgttgtaatcaagctggggtcgacgtaccatccgagctcgtggagtggcactcgctcctgggtttttatggtagcctgaagatgctgctgtaggatttttgtggctgaggtagtcgcaaattggggtggagagagtgtaggcaaagaagtatcctgtagggttccgggtcggaaatcagtcttgaggtctgttgctgggacagctccttcttgcatgctaggacctgggggactttcacacatctcatcgtcagataaaagaatgctgagatcctctgtggtcgtttcaacgctgacattgtcgtcgttgtcgtcgttgtgttgttcagtatcttgaattgaatatttgcgtctcttgggtgacggcacaaggtctgcaagcccggtttcactagcggcatgaaggaagtttgccctttggccgctaaataccgagatgggaatcttgatctgtttgttgctgggaccgacagccggataacgtttatcttgtttgtataaaaggctttcatcatgttgatacgatgatggctgggcttttgagctctttgacttactcccatgcgcatatccatcagttttctttgccataccaggtacgttcaagtcacagagcttgacgaaaaggtaccttggttggatccaatccaagtgttgcacgacgtagggactacggcacacaaactgattgggagcattgacgacctcattaagagaaatcaccgtcgcgagctccagccgactcgcggacaacgtgagagatgtggaaaacgtgggaagaaaattcctaccacagtatgacaatgaggtatggaagtggttcgacatgtaaacaccatgaccacaggagcggccatggacaacttgcttgaaatgcaacccctcacgtagaatactgtgccaattatgcaaagcgctgccatgccaagcgaatatagtaggatgctttggattctgggccaaagaattggagttgaccgcttgaagaaagcgctgctctttgtcgacagcaccttgaacaagtctgaattgcatgtagtcgcccattccatctatctgatgccgaggctcatcgacatcttgcttgatgaaagatcgatttgaggcgacaacccagcgtaaaaggtccaatccagcaggggatatgacgtctctccaggttgaaagaagcttgccccttttgtcactcccaatgaatgtcttcatttcctcgatactaggtagtatggccaataggcaagaaatcatccactgtttctgtgtgggtgccaaatcgtctagattggtgtcataaacaacaaatctcacttgctggggctccacccctagcacctctcctggctgcactcgacggcctctactaattggacatgagatgcgaatatgatttaacgtctcgccaatgtgttcaacacgacagtgccattctgcaggttttggagtcttcataatgaggacaatccaatcgccgactttgaccggagtcggctgatctagccgaatttcaagatcggttgcatcaaattgcccgatataatttgtagaacaatctgaattttcttcaggaagtagtttctcgggtacgcgtagccgaagaccagttgggaagtcttcaagaagccccgctgaagccctcgcgtatgccaggctggttagcaagtcaacgacaaagggctgggactgaatctcatactcaaggcttgcacccaggcccagcgccatgtattggtagaggcataaatcattggagcaaacatatggcttcagtgattcgaaggcatcaccagttttgcagtggcaaactaagcaaaattctgtgcacttgacaaaatgccgcagggtaaactgcatggcaagaagaggaaaagacatattagagatattgcggtccagttcggtcatatgatcagccaaaaggatttctggcgtcgacgtggcccagctgtccggctgatagtcctcctcggaaaagtcctcagagctgtaatccctgccttggttggtctggaagaaaagttctgcccctgtccatgaaagcccatgttttagtcgaagactgatgatcccaagcaggcgctctctgataagtaaattgagcgattttccaatgaacagcggcctgaaaagatgaccacgtattgttttgtccgaagtcatactctcgtctttcgtccgttgatcctgtgactcctgtataacttccatagcgtgctctaaggatggcttgtatgagctgcaaaggccaacattcatctgaaccggtgggtttttcgaatcaattgctatctcgataattgtttggagttcatggtaagtcggtcgataacggatcagcaaaaccaaatactccgacggttcgacgccccaagaatccatagcttcctcggaaatgccaagcttggaaatgcggcaagacactgacacaataatatcgccatgttttaaccccaggtatcccactttgaatcccgcgttcttgatcacacgaaggtcacggcgaatcttctctcgtaacttcgtcttactttgagtagatgtgaatattctggtttcatcatcagactcccagcctggctcagtatcaccggcagtcgagtcgtcggagtcggagtcacgagagcctaggtcctctaggtaactggatgtcgaatcaggatcaaccatagagttggtgatcattttctcaatgttgcgcaacaattcatggatagttaagcctgtgaatgaaggcactgcattttcgagggaggagctgactgtctttggacagttctcggacgatgggaagaccaaaaagccatggtccctgggataatcgtgagagtctgcttgtacgtcagcaagagattagatccttgaaagatactatgagctagtaatattaattaccggaaactatagcttggagatcaagggtgaggcttgcctcgggtgctgcaaatgtgaaggaaattgatccatcatactcccctgttctgatatcggaggtacaggggaatcgtccagggaccgctgcatctgcgagatctcgcaggaattctttgcgtggcatagtacggtttgactgcgttgaaattttgaaaagaaggtggaaaagaagaagtaatgagacgcgaaagtcagtgtcaagagtcggtcaagggatcaagcctagaagtgcttcatgtatatcaaagaagtatatcgagcaaaataaagacacgatgagaaaagaatgacgagcacagaagaaaaacaaagagtaacggcgtaaaccatttggtgatttcaaccatgaccaggtacttaggcagcctcaggccccgattaggaatagccccactatcttaattcttatctaatcgggtcgatcggtcttggcaggtccactccggggcttctatacttcatgcattacggagtagacaaactcatacatgcaaacctacagacctaagctagatccaagtctacaggaaaataagagaggcacgaaggagaaaatcagaggttcgcttttgaggaggtctttgcgagtatcctccagagaaagcgccattttgaattctagttcgtgagatagtctaggtgctcccctcatactcacggtaagatgtatagaaagggctcgcttagggagtgtttcttgcctctgatgctagaacaattcagtccatgaatatgtgtcaacgaatcagcaggcgaagcatgacttctgtcacaagaatacagtgcaacagtgggcttgacattgaagacaatgcaaattctagcattcgaaactgatttatatctgtcaaggaactgttaaacttcgattctattattattatgcctatttcaattcgacctttccaagcattgcgtccgagttgcactacaacatctacaacggtcacgtgcatatcaaacaagacaaacattcatcaccaatacaagtaaggcttcatcaatctccaatcttttcagtaacacaatcatgttgccccctcgaagcgccatcggtcgaataccgagtcatatccggccaactcatctgcctcggatctccggtcccaacgtacatctccgaccattcacccaccgcacacgcctacttcttctttctccagcgccgggtcgccctcaactacccttcctatcacctcttgcgccgacccgtccactcccaccgctatcaatccacctccgccagcatttcggtcgcttgatatctaccgagagccgcgagcattacaagcgaagggtatcgcgaggtgtcaagatcggcctgtcagtgtcggccatccttgtcttgttctctgcgatacagctcggcatctaccaagaaaacattgagcattcatggcccacaccaacagagtggtcctggaaaagccgctggtgtctgcgatctgcgcaggcactgcagaatcctgagcagatcggcaagctgatgacgaattggcctatggtcgctgggtatcttcgcgagctgctcgagcgtctggagaacctagagggtgagggcaaaggcctcatagaacagggtgagggtggattcctggtcgaaggcgtcggccacactgggttcgatgtctccgcaaagagtgagccttggcgccgtggatatttccaggccctgatgggtgctgccaaggctgctgagaacctggatggctggttgacagatcgcaagcagaagatatctgcgcctgcggaatatgttgttggaccctcgaatcctcgaccaaaacccatgcccgctggccagaagaaggtcccacgggaagaggattgtgaggaagcgtctccgtctccggagcgcttctacatgaagatcttgacaacaaagggctttgacacaaggcagaaacttgatgctgccttggcttatgctgattggcttgatttcaaaggcttgggccttacggcgggtgacatgtataagtgggccttggacattgctgctggtgggttgaaaggagatgctagcaaaattgtggatttgaagagcggcctgttgaagaataatagcggagagctaccttcagagaatattctccgtgtctccacggccctcgccgtccacaacgctcgtcaagccaatcttcccacagcgttatcccttttcacatctgttctcaaagcccgacgcagcctccctttatcatcggactatgatagatctcggtcctttccaactctgcctaaatccaacaacgacccattctcttctctcttcaaatcgcttaaaaatgtcctcattcccgtgaagtacccagaccctctcccatcaggcgacgaacccccacgtcgcaccacggcatcagcctgcgaagaagcaggattaatgacctacatcggcgagatcctgtacgcctcctcgtcgaaggattccggtcttgcctggacgcgcgatgcagtcgacatggccgagtccacgatgctccaactcagcaattcagccgaccgcactgctcgaactcgctgcgcacagtgtctgaaagttgggctggagaattggaaaatcatggtctctacccttgttacccgtgctcgacaagaagagcagaagagcagggatcaggctaagggtgcttggtttggcggcgaacgccgcgtagaagcgaagcagctcgatcgtcgacgttgggaggctgaagatgctattctagaggatcggattcgtcgtctcttccctctcctcgagggcgagtccgggctggatctcctcgctccaaatagctctttgtttgtgtagtgttattatctacttgtatacctggacatttttggtggagttgaggtgacttttgaatatgtacaacatacagattatgttcgccatggcggtcaattttgttatccaatcagatttcccgtatatcaaaacccgtcgagctttgtagacctctgtactccgtacagtccagcgaagtaagcaaatcgacgaggattggcaatatcctatgttacaagtgtctatcattgagggttgactaaatcgaataatgtagtgtatgtcacaaagaaacaatatatttttctaagcgcgaagacgttcttgctaccttcaagagttcgcaccacagtttctttgtggcctgagttctatctcattgtgttatttgcgtcaacctcatcgttgaagttatatatatataacccgggacttctaatgagtcaagaaaccaacaatccgagcttcatgcgctttgagggagtgttcttgtatgaaaatgaagcaaatggtaagaaatatttcttatatttgaaacatatcattgtagacctattgagagacgtgtcttggtcaaatagtctagtcacagtctctacatagcggtattggggattacgatcagccgatgcaaattggaagcataggctttgagacaaatagatatatgatccaaaaagagacaaaagaaatagcagcaagaatgaatgttgactagtacatagtaagcttcgcctcgctctgtcaactggaccttgagctccccaagcatttgactgtgtttccacatgggaacgacagtgtggtatatgtacatggaagagccaaccctgacacacactcaatgatttcctggcggattcgaaggggagtctcgagtatatggaaagattgcgagcggcctaatttaggtggccttgtccttgttgtggtagttcacatcggagttccagctgtagatgagttagtcctggggtttcagggggtgatgtggaatgtcatgcgatccggttgagaaagcagatcatcagatgtaagattgcagaagctgctgttccgcagaacaatgtatagtatgtggtggggtggaaagtcggaactcacaagatggtctattccggacatagattagctcgagtcttcagcacacagcataattggatccacataccttatcaccgtctccccaagggaagttcttcgtgcggatgttctggtaagggtactcggtgcgctcctcgagcgggggcatgtgcgaccagtgctcccagtgctcattccagaggttgtaggcgttgagaccaccaccaatcaggcagggaatcacggcactatgaagtaattaagttttaggtaagagtgtcaaaccaaggagtggattgaaacgtacaagacggacagcttgagccagaggcctgtggaataatcgggtcagtaatggatattatctacggccaatgaccatgctgcacaatcaattgagttaattgtagggtacatactgctggtagaggcagcatggtgcttgacggcagctctctcgcggttgaattcgttgtcgacgatccaagaaggcttcgcttcggcgctgttgaaacggcgctggatggtggagcggaccggagcggaacgcatctgctgcgaagcacgctgggaaaggcgaccgatattgcgttgagggaacatggtgggtgatgctaaggagatctcttagtggtgaaggtcaaaagtggtgcgatgaggtctgaagccgtctttagcgtatccccgtgatctcccggattatgtaacctgatgtcatgaggccttatatatcaggcagacacaaggctactagaatcacgtgatggttttgaatatgtatgaacgtcgggatgcaggtcccgcaaccaattaactagattgaataagtaagggtggctctaatccttggctgactcgatcttttatattgtatttcgacctgtcttgatcatttgcatcgcaagaaatgccgcgttgtccccggatacactagcgcgtccaacatgggagttcgcataaccacgtggaatggtaagtcctatctgaatcatcgggagctctgagtagtgaatatataccaacggcgcataaccttttagtcaatggtatacggtatgaaagaaacctgctagttgaaccggttcaacactaatataacaaaagaaacccgttctcctatgagccatggagaggaacgcgcacatttgaggtaagtgtatatccttctatttcacagtagccgagcttatctagtctaaagtctatgtttgatatactggaggcggatattgtaattctccaagaaaccaagattcagcgcaaagacctccgcgatgacatggtcttggttccaggatgggattgttatttcagtctccctcgagtcaaaaaaggcaagctaatgctccattgctatatatacagaagattaacagcttttaggatactcgggtgttgtgatctacacgcgcaatgccacttgttctccaataagggcagaagagggcattactggggttctctgcccaccaaaatcctcaacatctttctgcagtcttccagaagagcagcagattggtggatatccaacgttagatcagctttccaggcccgcaatgaatctcgaggggcctgactcggaagaggagcaagagtatgttagctcggtgcccaataccacaatagatgcaccaaacctcgactccgaagggcgttgcgtcattctggagtttcctgcatttgtccttattggtgtctactgccctgcctatcgggatgagaatcgagatacctttcgcatggactttctcaatgtcctagattctcgaatccgaaacctgattgcgatggggaagaatgtggtcgtggctggggacatcaatatttcgaagcagggcattgatgctgctcatggaattgaggccatacgaaaaggtacaatgaccgaggaagaatttatatctgcgccttctcgacgcctgtttaaccacttgatatcggatggcgttgttattggtgaacgtgacaaaggcagagaagatcctgttctcttcgatgtctgcaggtcattccatccaggtcgtgcaggcatgtatacatgctgggaccagaaactcaatgctcgaccagggaattacggctcaaggattgattatgtgttgtgcagccttggtatgcggagctggttctccgactcaaacattcaagagggactgatggtatagacttctcgcatttatgatgtgaatcattgactgactgatttctagggatcagaccattgtcctgtgtatgctgttatcaaggagtctgtgaaccagcccaaaggcgaagtaaacgttcgggatattctcaacccgccaggaatgtttcactgtggcaggcgtcaacaggaatactcaaacgagtgcgcattgcccgcttcggggcgtttgctccccgaatttgacgttgataagcgcagaagcatcaaggacatgttctctcgaaaaccaaccagcgttccgtcgagggcggtagacctagccaacacaccggctaacattcccacgactcgagtcacagaatctacagacattcacgcagccttcggatccactgactcggccaaaaaaatctctgcgcctatcactgcgagaaatcaacttcctcagactgtttctcgcaaacgttcgcagcctctacctaccacatccgcgaaacgcaccaaatccgccgtatcgacgtcttctgggggctctgcggcaggccagaaaatgttaacaggcttcttcaagccaagggctgttatatctgaaaccacccagtcacctattcctttatcaggatcctcgacaccatcactcaatcccgaaccatcaggacagtcacaagagaaggggaaatatccagagatcagcctgcagtctccggggttacaagaagaaagcataagagaggaagctgatatttctaccgaagggccaacggccaggaagttcattgacgacacaataattgacccgattgtcagcaaggaggattggtcaaaactttttaccaagaaacctgttccaccatgcgatgggcaccaagagccatgtattagattgaccacgaagaaacccgggatgaatcgcggccgctccttttggatctgtcctcggccattgggacccagcggagaaaaggagaagggtacgcaatggcgttgtcccactttcatctgggccagtgactggaactcgccggttgcgacgcaagagcaataacatacatgtcccaggaaggcagatatcccttgatagccaacagagttactggaaattctacacccgagtatcgatattcatacgttgtaaatctagcgaggttgagccccggacaatccaaagattaggcgtacgcatgcataactcatgaagactgcttctgatgtcctgttgtcctagcaataatcaacgagtagggcactttgcatgctattcaaaaggatgtcatgtactcaaatgccagcatgtagcgggcaatccatagcgcaaacttcattgaagtctcccaggtctccagccattttccctagttccatttgtggactagtagctgccagtttctttgttctattgtcttctttgtttacctgggctttatttgtttaatttattgtatttatcgagttgatgtcccgattgggcatttttctttttttcgatttaatttcgttgtttgattatttattattttattattattttattattttaattagttaatcatttaattaattattatttcatgagtcacttcgtttgcccgttgccatgggaattcgagtcacgatacatttgagtcggaacgtcgacaactgactcactcccatattactcatagtttaaatcattatttcacaatgaccgagattatgcaattagaaacagacttcgtagttcaaagctatgtattttgtgcaaagtttggtatgttttttaaagttacatgtggcagcgggatacagcgggagctagtccccggatctgcagtggcacgcgccatatgcacatcaaccgtagcacagacagagctagtatagatcgaactacatagtatatcttcatgaactattaggatatactattcattgtaattattaggtagagcagcatatcaaacacgtaatgtacggttacaatccgaatggacagtccaagcatctaaatagacaaaatagtatacgacctgtttgtcgcactagtacttgatggcaaggtcacttgtagcatagtcatatccctccagaattgactttctttgttctactgctactatgcctaatggggaagtcttctctgaggatgagaccttgtgattggtgtcgctgggcaaacaaagaaacacgtctctcaccccgccaaacaaagaaaccacccaactcggcacctaccttgttctgcgctcccagcccctccgggactatatttgtttacctcgcgccttgtttcttcttcttcctcttccctctcctctctccatcccgttctctttttcttgcacttcacatccaaattttctatcttactacatttcattacaataactcattgtatctatcttttcagttaatcttgttcatcatggcgaataccctctttgagctggttggtgaggacgacgacatgtctcctcgccgtactatggagctcctttgggcagatgccgtcgcccatcttcctcagactgatggtgaagtgttcctgccgcgcaacgttgttgatgacgtgcttgacatggatcttctcatggacatggcaacccgccttgcgtaagtcttgaccagtggctatttggaccatgttattaacgagccataataggagcatgctcaacaagaaagttgacattgttctcgatgaatccattgatgcttaccgcatgttccccaagcacatcgcagcggagaatgatgaagatgtgtgggttgaatcgcatggccttgagctcgatgatcaccgtcggatcagcaagtctatttacaatgctggcagctctgtgaagctccctgtccgtcctgccaaagttcctcgtccccccaactgtttcattctgtaccgccaggccaaccaccacttggtcaaggatgccaaccctggtgtctccaacaacgaaatttgtcagtctcctccaactgttcttgtcttgtttctagctaatgaatgaaccagctcgtatcctcggcgcacgttggaacaatgagagccccgagattcgggagcagttcactcgtctagctgatgatctgaagcgggagcacgctatcaagcaccccgactatcagtacgctcctcgtcgtccctccgagcgcaagcgtcgcaccccccgcgcccgtgccagctgtctgcctgtcgcccaggaagattccaactacgttgatgtcgatgaccagttgatgacaatcgatgacaagtttatgtctgagttgcacagcaacggttaccttttcggtccgaacggtgtcgagccagtgtccgcccctttcaccaacgaagaatgcttggaaatgagcaatgagctgctttcaggcaacgttcttgcttctctgccatacatccctatgttctaaatggcccttgtaccttgaccgggcgcgacaatgttgacaatcatgcaacaattgtctactttcacttcttggtgactctccggtcacgatgagattacaccgataaatctcagtcatcagactttcttttcggtttctactacgactcacaaaaaaacaaaagaaaaaaaaaaaaaaaaaaaaaaaaaaaaaaaaaaaaaaaaaaaaaaaacaaaaaaaaaaacgaaaacaaaaaaaaaaggtccctttgcatgtattttggctcatgacaagttttcaggaggagagtcgactgggtttctttcccacggggttttcctggtcgctctcctcctgccgagtgagcattgttctgtacctaacttgaaatcaattagtgattttctcaaacttctttctctcttgtagcacgtatattctcagatgaatatgtagaaacgcatctaggacacgatcgcaacctcttggtatcacaggtgctcagtgacatacttcgacaaccaaccattcccaaatcctatgcttaccaaaattacgaaccagacaccctcagtttctcactcagaatgccactgggcctatttcactttgatctcacagctcgactacacagcgacgcccagagcctcgagtctctgtctttgtgcatgaggtgacgtctcgatactctttgttcacagccgccgctaagtcggcgccacccgcggatcggcatgcactacatccatggttccaccagtcgggtatggaccgagggagacaacgcttggcatgccgcgtcgagcaagggacatccatgtccggccatgcgaccgtgcgaccgtgcgctctacaggggtatctatatctaccggcgctaggacatggacatggacgcaggggagtggatctacacatatacaacaaacgcactacaatgattcagggaactgggtaagttgcttgtattcgctatgggaaatcaaaacaagagactaactacgggattagggagaagagcccagaccgaaaaacgcaaagtgcgagacggacgaagcaaaactcctcaaaattgggatgtggaatatacacagacagccaagagcgaaagacagatgcgacggtttccctaatcttcctggtatgagatcttgcgcatttcgcccagacgctggcgggcgcgagcgagaccgttctcgagttggaggatttcgacctgttgggaggagacatattagcattgcatggatgggatataagggggaaggggacgtcacatacctgctgctccatctcgcggaccttgaactcgtgcgagctcaactttccataatcctctccgtcatcgccgtcgcgattcttctccttaatgatgtcctgcacttgtcgcacgagggcacggcaagcagcacccactgccttgctggcggtctccaggcggtcctgggtcttgctcatgaatgttgccttgacgcgactggctgcgacaagctgggcagtgctggctgcaacatcgttggaggcgacaataagttgctctggcgagttacggcccgagatcacaccgtccgcagtctcgatcaatgtgttggtcgaagaagccactgctttggcggcagagatcaagccctccgtccaacggttgttcttcttgtagaaggcagtgcgagacgagctaccacggccttcgcgaacaatctcttgctgggtctctgtagcggccttgatcagctccgagatcgcgttggtgacggcaatagcggcggcaaggatgacatcgttgatgcgcagctcgtaagtcgagaacccgtcacggggcttgttcttgagcttggccagacgctgggcagctgcgtcaatggcatcggcggccttgagcagctcctggtcgacaagatcacccaaatcaccactggtgctgatcttggtattcttgggagcgaacgattcaacaagcttcgacagcgcctgcaagtcacgctggacttcgaggttgttgttgatgacaacatcagtcttttgcagtggttccagaccttcgagacggaacgactgcaagctacggaagaaccgaacggtcgcttgagcagacttgcgtgcagcattaaccaggtgatcggagctcttgtcatcggtagcgaagcggatgaggcccttggtgttgctcaacacatccgagacagatccagagaagatggacactgtgcggataatctcggcatgaggactattggggccatcggcaacaaagttgttgaaagctgttgagaactcagtggcggaagctgacgccttttcaatctgcgaaaggacatatggaggagaggcattttggttaccggcctgcatggacgagtccaattcatacagagcatcatcgacacgctgcacaccagtctgcagcacggagtcgataatatcgttaatcttcgcgactgtaccgtgaagcacagtgtcaatctggctgtccagcgcatggtcgacatcgccttggctctatagttgactgtggtcagtatgcaggcattcaatatcatcaagatcatcactaaccagtctaagctcctccagttccataagagcctgttccataccagacttgtacacctcaatctcctcgtccttctcacgaagagacaggtcaagatcttcctggcggtcattgttgcgactggaatgttcgtccaatgcgcgcgttttaatctataaggtcagcataaatcacacatctcagcaagatggacagttactcactcggagggactcttccaaatcagccatctcccggttatacttggacagcaaggacgagatctcggttccctttgagcgttctgcattttcagcacgctcaagagccatacgaagctcacgcttgaccttctccaagtcatccttgttggttccggtcagacggtcacggtcgtgcagagcacgatcacgttcccgaatcatgtcagccagctccaagttcttagtcttcagctcgcgctccagcttctctcgtcgctcgattgcttcttgtgcggaggctgccttgagcttgaggctctttgtggtctgcagaagatctaggtgctcttgtcgaagctgtgagtacagtttggccaatgcctcgtacttggatctccaagtgttcacctgctcttgcagggatcgaatctgatcgtccttcgaggcattctgcaagttcaggttcgaggtcaagtggttcatctgctcctcaacctctttgacacggcggtcatattgctgcagcatcagctggtcgcgctcatactgtgcacgggcgttgagattctcctgctccagctctgccagccgaccttgggtttgggtctggtactggtcgcggagaagctgttcctgtgccaatcgctgctgttccgcctgcaggcgctgctgctcctcgaaatcgttctgggcttgctgttgggcaaggagttgctggcgttgctggtcctcccactgttgctgcaagcgttgttgttccgcctcgtactcttcttgctggcgtttagcttcgtttgtccagaaatcattgatcggctccggctcagcagcgaccttcggtggaggcgagggctggtgttccacttctttcgtcggtcgtctgggaagagctgggcgatcgtcatcctcggaaagcaaatttggtggatcttgtggcaacttcgggatggtgatgaggcctgttaggtagcgcaggttggaacactcatagtagaaccgaacaaggcggtgatgctgggcatcatatcgacctcggagtggctcgagagcttcatcctctccggtggctacaggagacatcagtcagcggctatttaacgcagattcaaggaccaaaggccacatacttgtgtgcatggctcgcagcatgctggtgatgaacttgtagatgccataactctcctgcacaagtggcaccaatgccgagattcgacattcgttgttcgtgccggactggaagttcgagaagatgagcttttggaaggaatcaatttgatcttgcaaagacatcaaatcggtgatggtctcgtagctttgtgactgtcaacacgtttctccattgtcgcaaaaaccaggtatttacgtacccttcgttcggatcattgatcaatttcagactaatgtactcctcatattcaaacaagcctgcgactgtcagacccccgcacttgacagaactcatcgaccatggacaacataccgttgaattcggggtgattgcgatggaagttcagtttcgcctcgaggaagaagacatactctcgaatgagcggcgcatatcctatccataactgttattataccgtccgttgcatgcgtcgctactcctcgggcagagagcaattgcgcagtcgtcctgcgtggaatccatacctcgaacgccgtcgcctccgactcctcgcatcaaactatcaatccagttggtatgttgctgcgcctcacggataaccatggggtggccctcctggagaaccttgtgtattgtgatcagggccttgaacgtctggacctcgtcggcgaggacgggctgcctatgaagaacgaagccgtgtcagccatatcgagaacaatacccctgaccacgtctttcaggtattccaaaacttacactttcattccagcccagaaagccgccgatgacttgtggtcccacgtatagacgatgcagcttcgcacatgtttccctacaggcgcggggggtggtcagttcgattcggacggggcaaagccgaggcggcatcaatcgtttcgatggagggaatggtaatattgtcagaacatacgtttgggagcggtttcctctgttggttgtcaaaatgtcagtcatcatgtcctgtcccccgtgtcggtctcatccccgattgactacttaccgatactggtggccttgcggatattgatggccaaatcggcctcggtcctgcgcaatcctttatcagacaaacactctcaaagtcccatgtcggtcttgcttaccgactcatcgtggccgttggggtgtgtgctcaggggggaggagggtgtatgaaggtcgggaaggtttgtcgcgttgacaagatcttgagcccggacagcgcacagacgctaagaataggttgcgctgaccggaataagcggatatttcgaatcgcaaagcaaaggcgaaaaagacacacgtgggagtccggacaatgacgttgatggggaacgggaaagttggcgcctgtcgggagtcttggcgacgcctaagccgatgcgggtttgggccgcggcttggattctaaggcttcatccctgacgaaagctgtctcggtctacgcctcacatacacactccaggctaggcagaaggaatacatgggctattcatcatggccgatctctacggtgtgcttggtctacttcgttcgaaacgacttaagatcggcatggatatatggaatatcggaggattagctacatacataaagaagccacataaaggacttgggatacactgtgcgagagagcgatcacatgcggggataaccaacccgatatggagactgctatccagcacagcaatatggccaagcagtcgaaaaaaaagtacaaagggcctcgccatccaattcgatggtcgtatgatctatctataccaagggtccttggtcctcggtccttcccctctttcgtgtctgggcgaaggcaacgagcattatggtgagggtgtttctactctttcagtagacgccagggtttcatgactgcctggagctgaagagggcacctgttcaacagagcacggcgattcaacagcaggcaactgtccttgctcctccaaccgtccttgcccttcatgattcacctcgagctgctcggcctttaatggtgtctcactctcaacaggagtcggggctattagactggagtctgattccgggtccccaggggccgggctatttggctcggactcttggggagcttccaccacgagaagttcgtcagtaccttggttagcacgcacttcagggggcattggtttcctgcgtggtaaagttgatggtggggagtgttggtctcgttcaggcactgtgtgtgctgctacaggtttacgcttgggcaattttcctgagttcctcttcagggcatatttgtctgggcgcggcaatggtgttccaagtggtggatgaggatggccacgcccaatcggttgggtaagcgtgcctggaggagtccgcgacgattcttgaccgtgattttggtcacctttaccaaacacgctccaactccatttcttggcagcggcggtggcttgcccgagagtcatcggacccgaaggcttatcgtcggaagatgtaaaggttttggtgatagtttcaattgtgctgcgtcttggggccgtatcgctgacaagggacgtggtggaactaccccgagagtttctcgagctggggaagcccccgctctccatgcgagtagaagaaggtctttgaataaaactctcatgtggaaaacgaacgctgtcaatagaatctgcaatcgatgacccgcggctatggagcgcattttctggtatcataaggccacctgtaggtggcgaggtgcccggggtttggttcggggatgtaggtggggaccggcttgatatctctatcatggcgcttgttgcatgactcttttcttcgcctttgctctccgaaacaagcttgtcaaccttggcattgtccgctgtgactacgggatctgcagcgtgggaaaaagtctgtgaccgaatagctcgaggcagcggtgtgctgcccggtctctcaacgccagttgaacttgcagttgcagtggaatcgttcgattgcagatccgatagggaagatttcacgcctttgcgcagcttcttcttgaccgttccggactcagaaaggacaggcatgctcatcgtgcgatcgtccttgaccctgagggcttcaatgggattactgtcaacgctctttggggtcgagggagctacgccagattcatctggtatctctggtatctctacctgagcactcgactctggagtgtctcgctgccagacaccaccgcggaaagcctggccgagcgtattatggaagggaacgtcgtcccagaaaggcagaacgatgctctctgccactgcttcgcggatcttactctcgatcgtgcgaaggatgaggctgtatgtgatttgtttggagctgacaatgggttggatgtccatttccatcttcggcatcgtttcgaaagacatccagatgcgattgctaggtgggggcttgaagcgtaccaacaaatggccttcaagtttcttcaacacaacggcaaggacaatatcgacctctctggccttgaatcgagtgcctaagtcaatacgcaccgtcgccgagatctcgacccggaagtttcctgtgtattgcatatcggcttccacgcagcaattgccgtccacagtcaagtccttgagtcttgggttggtgataaatggagccccttcacccatatcaattctctgtaagccgatcttgctgataaagttaggtttgttggcgcgagagatcttcttgacgatcttgctccgcacgaaagcctcatactcaggtgtccggtacatcgctaaaaaccaccttccaaggaaagcattgatccaacgcgtctgcaactgctcttcggatgaatgcagacgctgaaccaaggtgacaatatgtttggtatcaaactcctggggcttgggcgggcgatcaggcgagtcccacagccggttttgattctgcagcatggcgatatagaaatcctccttctcagacaaattttcagagaagaggtaaaacggcggagtcggtcctcctagatccccaagcgagcccagtcgccgtgagaggcagatggcgtttcttttgagccacagctctccttctgggatatccccttctccgccatatatggtcacatcgtggtgagcaagcgaaatgacataccgcacctcgacctgattcacgtcatcataaagcatcaagtggccatgtctgagcacatatcatccatcgtcagcaattagcgcttaaatagcagcctatacatccagacaaagagatgcataccggagaacaatgtaaaagacatttcgcgcccgtttcgtggtctttccattcgccttcgccggatcgatgctgggtgcctgctttcgatcgaacagactccggtacatggtctgatacacgctaggactttcggccgcgacgacttctcccgcgggtgtcgttctctccgggggtttcccattgacaccaccgggtacatattcacgacagacggcaaagtatccggcagcgacatcggactcgtgcgtgcgatggaatttctccgccagctggtctgtgccggacatgagactaaagtcgtcatcggtgggttggcggaccggatcgggcgctttctcgcatggttgcggcggttgcggtgccggtgggagggtcagataggcgtagaggagaaataaggacaagactagtggaatgaaagtaattccaccgagggcgtaaacgaagaggaagctagcgagcgaacccatcgggaaccagtcgatcaatgcgggcggatcgaaagctccatagtttgggagagcgacctccaacagcttagaaagaacacggcaaacaggaagagaccggctccggaataaaacgagcgatgggggacaaagaattatcaggcacaagtgagtgagttgaagggagttggtagcttccaaagtcatgacgggatgacgaaggtcaactgtgttgagacatcggtattggtgttttgtatctgtattactagtaaagtacttgctttagtaaatgtaatgctgtatttatattgtatttttaatacctactataatcttacctgtagctccgcttgtaccccacctgaatcaaccagctgtcaggaacatgagaagaatcctggaaaccaacaacctcacctgttactgttttagtcaattccaattgtggatggggttaatttagcctaaaatgggtattaaagaccttagatcagcgaaatagtcgataattctcctcttcatgcagtgcaacagtgactttaagacccgccgatcagataatcctgcattctataactatagacatcacactagcagagtttagcattatggacaagatctcaacatattttgccagttcttttatttagggttcatgtatgtatccatccatgattaagaactagcgtatataacatccatggataatgcgagaagagaagaaaacgttcctattggtgaagatcatatatatatatacatccaaccatctaagacatctaagtgtacatagcatatagaaaacaaaataaccgaagaaacaacagaaattgggcaagctgaaagacaagtatgtgtacatgggagcgcaatctcctctacttcctgcgattcatggtcttttcgcacatctcaatcagaccggtcttggcatcactatctgggaagtcgctgatggcggcaatggccttgtcagcgtattcctgggccagggcacgggtctgctcaacaccgttgctacggtaaacgagctcacgagcctagtaaaaccgagtcgttagtatcattgcatcaagcaaggtcacccgcgattttgaacacccaccttctgcacatcaccctccttgccgaacttccgtccaaccaggggaccaagctccgggttgctcttccacgcaaacaagagtggcgcagtggccaatccaagctccaagtctgcaccaactggtttgcccatctccgcctcggtgaccgtgtaatccaacatatcatcaacaagctggaaagctagacccaggttacggccatatgcgtacgaagcctcgataacctccggagcactccgtcccagaaccgcagcggaacggcaggacttgctgatcagactggcggtcttcaggtaggtcttctggaggtagtaggcaagtgtctcgtcggtgtagacgggtttcgcttcgtcttgcgcggtgttcttcagttgcatgaactcgccctccaccagattagcaataacagtggccatgagttcggtgacctcaggatcgcgcagacgagccagcgctaccgaggcacgcccaagcaagaagtcaccggctagcacggccatcttatttccgaacgctaggtttgcagagctattggcgcggcgtgtaacggcattgtcgataacatcgtcgtgcaggagagacgctgtgtgaatcaactctgtgatctcggccagccgccgttgtgaaggtaggatgttgtcatctcccacgagatcatatttgctctcggcgttcggggccacgagcgggttcatttctgggttggcgtcttcgaggatagatggtgcactgaaggaggaatcgacggggctcggtttatccgtgtaggtatggtgcttgcgagggtccaaagctgttgcttgggacatgaggagaacaagcatgggccgcatgtgcttgccctcactatgagtgtagtacttggcgaccttatccagagctgggtgacccgatccaagtaattgtcggatgttcttggtgaggaatttgagctctttcccaaccattctcaacgggtcgacggagatacctggaggcgccttcggcatacccttgaagatggcctgggccgctgtcacggcggccccaaatggtgaggcatcccgccggcgtgtcgggtggtatttgcgagattgaagagcaatatgcacgaagcggaggtcatcgcggaggcattgggaacagacagttgctcgtgatgagaggatcagcccggtggccgatgcagttcgagctcccatgctcaatgcgagggctcttcaattataaacgagagattccaaattaaaccataggaaaccaatcccagggaacaatatcgatgtgaggtgtctgcggagtccaaggacgaacaatcttgcgggcgggaagatttcgagctctctcgggtcggcacggacccggtacctacgcagccaagtatgactcggtgacctgctattgacacttctctacttcaaaaagatacgattaaggtgatattaatagaggacagtatagtctacaagtcattgatcactcagttatggcatacgattctaataaaggcacaatgcaagaaataattccagtataatagacacagaaaactgcgccggccatcttggtccccttcgtaaacatccgaatgaagaaccagaacaaggaaaacaaattgcacaattaacacaagggttgaagaaggccgctacgaggtagatacccatgcatgggaccagtgcggtagacggggaagaaaaaatgctgtatcgattatggaacaaccacactcctctttaaatggcatcgaaatcaccaccggcatcttcatcgtccatgtctccctcctggatctctttggcaagctcgcgctcccgttcccgagcttcttgggcactcttgagctccaggcggtgctggttcatggggaaacgcatagcctagatcgagtccatgttagtagatattattttagggatgttcagtgagagacggaataacataccttaacactctcatcgtggagggccagacaggcgcggatacgctcgtggaacgcctcgccaggctctctggtggcatagatgtcacccacttccttactcttcatgaatccgtgctcgtgatcaagcgtagcctcgataacaccgtctcgaatagccttggccacaatgtactcggcagattcttcgctgtcgagtccaaggcgaaggcaaatatcccgcagcgagatacgagagtaagacagtgacatcatgcgaataccggtcttgatgacattctgccgaagacgcaagatcaaggtgtatgtgccatctttccggaaagtctcactgtaggtgttgacaatgttgaggaacccatccagatcagcaacactgactgcctgagaaagcaacagataagggtgcatggcccgttccagagccggttggcggaagactgcacggtcaggaatatcacccatcaatagctcgacaacgaccaacaacttgttagaggcctggtagaacccacgagccaccgggctagcaggcgacttacgcgtagccccaatcagatgactatgggcctctgtgtattgcagctgaatagcacggatgcggccgaggtagaacagataccgagcaatctgattgttagaagcagccacggggaatgggttgtgcgagatcagtagatctgcctgtgagatatgagacgtggacaggtagttgcgaagcagcaaggtcatcacagtagcctgtgtatcgacatctttccgaagcacagccgtgcgaagcgccgccaacaatggctggcggatagtggtaacagccgctgcaggagaaggaggaagcggagcgatttgctcgaagaagagagagtagtaaaagtacgcgcgggcggtgagagaatccagcgtacgacggttcaatgctcgcaggcgctcgatcaagtttgtcgagaactggactcccttctgaatctctcgttggtcgaacaggtatatctggacgagaatagcaagatatgcatccacctcggcaagggtctcctgagcgatgggattcttatccgagtcaacttccatatccgaactagctggagcattttcgaaagcattggtttggccaagagcttccaaaaggaacgaggcggtagagctagaagcggaataggtttccacaatgacttcggcgaggacctccggggtgaggtgtttccgcatcgacgatatcgatcgcagaacacggagggtaaatctggggtcgaaatgggcaacggctcgctcgagaagggtaaagttggatttgatgtctaaaagcatgccggacaaacagacatatagttagacatttggacttctttgagcaacaaggaaaactagacgaaccttgaatcgccttagttgtcgggtcgacctctggctcggtggtctcgacatcctccgcaccttccatcgtcacatcgtcctccttatccttgccagacgatttggaacccttggttgggggcactacaacagtcatcttctcgttacttttgcggtccttgctggtgctggatgaggatgtaggcgcacctgccgtatctcccatctcaacatcttcggatccattcacaccgttctcggttgacttcgatccgttcgtatgcgacttatcatcgtctcccatgttgccgtttgatgcgccttttgcgtctttcttggtcggagctgacttggccttgttggcggcggcgcgagtagtgggcgccttgtctttcgcacccgggctctgagagttcgagtttgccttttcaccgttagcggatgaagaggtgtcggatttattgtttgatcgcaaagaacgcctttcggccggcatctttctcaagctgttgagctcggctgggcagccaccaagctatggaaggagtagggggaagggcgagtgagcacgatgtgaagatagaaagcggaaaagcaattccaaaagagccaagctgctgatatcacgagtctcgatgaagaaaaacttgtgtggacagatggatgaagtggatgggtgatgtgatgtcaagagatgggatgaacgggcgcgagagaccagatgagtgcttagtcagtaggagcttaccgcagcctcactcggcgcttttgctgttgaagctgttacaaccagaatatattgaaagaaaattggcaacaatagaataagaacaatctgtaaatctaaactaaatcagcaccatcgtatttggtcaaatttagcttggctagatgcaattactgatacccaggcatattctgaatttaatgcctcaggcatatatgcagctttccgagaggtaaacggtgcggtgcagtgtagagcgttcaaccactcatccttcacgatctaaggctctcaaaacacccacaacatgtcattgctcaattctcacctagaacagattagactctcttccaatgctatcgccgatttgccgttagtgcctatgatctccctcaaccatgttgctttgactaacgcaagcaagcattcaggttccctcccccacgtattttcaccactgcactgctgggctctcacgatataacagcattgattcgtgataccgaagcccacgaacgagcactcttccaggttgacccgtctaccaaagcccatggaccacaaagacgcgccacacgacgcgggactatgttccccgctgagaccgaaagggagtcaatggcaagccgcatttattcagcgcgggacaagcgcaaccagtctgcagtggcaagggtactgggacatgatatgatggaggagatcaagcgatcagcgggcacctcgactagaggaccccgcggggaggtcaacattgaagtgcttcttcgaggcgccgagatcctgtgcaatgtttagtgagtgctatatacctgataacaagtattgcttgatctaaccagctcaaagccccgttgccggtgcacaggaaaaaattgccaaccttcgctatcggcgtgagatgatcagtgagtccatagcgcagttagaaggccgggttgcaacgaatactgcagaactggatcatatgagacactcttatggagatgatgaagatgattttccccctgcaccggtggcacagccagagattccagaggtcactgatgaggatattgaacgggagttggctgaaatccggggcttggagcagaggaagcgaaggctcgaagaacgggttacaggcatggatcgagatttgggtggtttgataggctgagcctttctttcgcgatggttatattcctgccttatggaagaccttctactgacctcttgtctgcctctctacccaccaaacaaggacatcatgctctctggacacctccggctggataccacaactctatctaaatgaggagctctccaggttgatgactcgtccctggtttacactgccctgaccattggagacaatagggtctgacaagttgttatacttagccagaatagccttctcagttctgcatgctgctcatactgagcctttgtcccgagtgaggcttacttttgggtcgcttctaagtttcaccgaaaatgcgcctgacacctgcgtcaaggtcctcaccacccacagcctctggtgcccgtcctatccatgccaagttccctatgggagattttcgtgatacatacagcttttcatgttttacgatagtcatgaatatcaaggtaaatccattattcacgatattattactcagcatcaactgggttatttacaacgtactatagcagaaaccacgtactacatactagtgaatttcctctgttatttcttccaaggcatgtcaaatatggctgtgagtattccgtatctccaaaaatcatagaacggcctacctggacaaaagcaagcgcaggcttaaccccgagttcatatagcgccattggcccgtttgggtgtatgattggagaggttgtgagcacagtgcaaacgttgcttatattaccgccgtgacaccaccgatgcccgtacctgttaccatgtatatagatatgtgaccagcggtcgctattaggcggctgccagctacacaatatcatcatctcttccctcagctatcaatgcaatgaccggtagcatgtcgtggtatatgaccaggcctattatcttcactctgcattgatcaaatccctagcggtcttgtggttcttatatatcttctctccattcactcagatatcatccgggcgggggggacgcagttcctaggacgcctgcgaccattgaacagcttcatgatctttatcttgctctcatttgcgattgtacttctaataccctgttgctgctagtgggtgtattggtctacatggatcatgcaaaggaaggaagcaggatacacgcgtaacaaggatagtcggccgcttgtgtagcctgtcatgtcttctagtggtctttttatttgtctttttatttgtctttttggatgtctttttggatgtctttttttcgggtatttctccccattctcgatcacttaacaggcttctcccagagccttgaatttttgtggaatttcagaaaagttcggggcatgcaagcctaaaatatggtcaataacgaaccaatgaccgcgatgttatttacttcttcgaaaaagcaatatggccaggcccagcccgacctagcccggcctaaccacgtggtttgttttgctttttgctttcatttggtatatgtacccccgatcagcaagaggagatgtaaacagaggcgcaagacaacaaagtgtgtgcgagcactggagttgcccatccagcaagcgctccgtggggtggaggatcagtcttagacagctgagacatccagtagcagttcttttatagggtcagagagaatagctgtttaacgtatataggttaattggccctaaagccctgaaccgtcaatcacgtagcatctacacaagaatgtgacaacattggacctggctgtcctcgacagcaatgaatcaactagatgattccaaaatggcatttttgagtatattaatggttggagttgtatactattttgaatgagcagactggtgtaaaggcggtttatcagaattcgctgtgattgtctatagatcagtgaccaggcacgtgataatggttcgtgctcaggcttactcctgaagttgaccatgcgatatacagcaatagtacatagactagttgatctaaagtcgaagaatatcacaggcaatcaaaaatagccaaattatcatactaaataataaagatatatgaatctgcgagattgtagtttgaacatctctgttataaaggacggatgccaagaccgggcccaacctcatccgccgtcagaagtcgtaatctgccaaatctgaggttgattgcattcgaacttgcctgctctaacatctgcgcgatagactacagccttgcttgatttctaggcaacggcgatcggctatatatattaacatagaccatttcgtgacgaccaccctgtctccaccattcaactcctgcccttgaatcactagcagagtaccagcatatcaactcggatatggatgggtctcagggccaagttggccagccaatgggtgtcccacagcagccacagcactcaaatctcattcgaaccgatcaagtacagaagctaccgcacctcagtgaccagcagaaggcccagcatacccaactggtgcgcagcctctgggatatgttgaacacccgcgatccacagacccacgaataccaacaggcgcatacgaagctctcgcagctctcacagaacttgatgaaaggaatgcgggttttccagcagaatcgacagcaggcaatgcagcatcagcaccagcaagcggtgcagggacagccaggacaacagccacagcaagggacacagccggtacagcaagctacccagggagctgttcagggagcgcaggggccacagggacaaccagtccagcggacgcaatcgaacaatccacagacgattaatcagctcattccgcaaatccaagcccgggtcagcgcgctcaatttcttcctgcctccgaacgtgactcccgagcaggtgcagacatggatacctgaagcccggttgcgatatggtatcgctcttcagaaacaagaggttggacgagctcggatggctgatcttcgttcgtcatatgctcagcggcaggcccagggcaatatgagccaggaggaaatgcaagaattcaaaaaccgacagctggcagctgaaaagctgttccgagagggtagcgagttcttgaacaagttcaaggaacagcaggaaagctttaagcttcaatcgcagcaaaatccacagaatcaagccatgaatcaggcaggacaggggaatacgcctgctaatttgaaccaaaccccagtcgcgcctcccatgtcaacacaaaacgtgccaaatccccaggcaggagcggcagccaaccccatgcaatcaggacaaactcaagccccagctcctcacaccatcaactcagcggtcaacgcagcacgccaaactgcaatgtctccctctacctctcagcctggacagccaccttctgcgcaatctgctggaaacactccagtcccaatcagtgcaccgctgcctcaagtgcaacgtccacagccatcccagcaaggaactccaggaggacaagtcacattcagccaaaaccctcatcctgacggttccgcccccacgccaccagggcccccccaacaggtgaaccaaggcccacctcgtcctctctcgcaccaagctgctatctcacaagcagcgcaaacctacaccaaccccacccctcaacagcaaacaatgactcagcaagcccaggctaaccagcaggctcacccccagggttatctttcaaaccgtccaggcgaaacttccacccgtaacaccaacatggcaatccccaagaaccttcatgtctccacccccgagcccgtgtcaatgccaggctcgcgcccctctctttctggcggtcccagccacggtgccatgggtatgatgggccagcccgcgatccaaaaacaccctggctacgtcctggaaggtgaaggccagcgcgtgctgagcaagaagatgctcgacatcctcgtgcgacaggtgaccggtggcggcgaaggagaaatgctgactccagatgcggaagaggtatgtttgtcccgtttctccctttcacaatgagagataaatatgaaagaaaagatcggaaatattaatggtttcacagttcatcctccaaatggccgacgacttcgtcgacgaagtcatcacccaggcctgccgtctcgccaaactgcgcccttcctcgaccctcgagctgcgcgatatccagctcgtccttgaacgcaactacaacatgcgtatctccggcttctcgaccgatgacctccgcaccgtcaagaagccccagcctacccagggctggactcagaagatgtccgctgtccaggctgccaaagtcactcaaggcaagaacgagtaagatgcagatggtctgccatctgtcttttctgattatgctgcacacaacgcttttctttacgttttttcttctcttggaggtcaaatagggtgttttttctttcttctttttctttccccatcttactattttacccttttatattgtctcttgagaatatggcgtacctggtgtatgggcaggtctttcttcgcttctttcatttggccgcattcatggttgggacggggtcttcttggtcttttagttaggtccatatatgctttctggccgcccagtctatgcagtgcttggataatgaattttctatcctggctttcctggcttttctagatttgtttcggtccgtgtgctgttagtcttgtgtatgtatgtgctggccttgggctctactctacgtctgtccactccaatatagagaagatataggcatattgaatcaagccttactgcgcactgtatctaggtagttaccctctgtacagtgttactatcaagtatttactttaccatttacgaatggatacaacgaacagaaaaaaaagtaagttcccacgctgaattctgctaagttgatcatcctcagcagttaagaagcacgaatatcgggagacaacatgtggtatagtggttagtacagggtatggagagagactcgatcagggaagaagcaaatcaaagagaaaagaagaagaagaagaagtgggatacacaagagaggtacaaaaaggaaaaaaagcgctcgatgaacggagtgaggaccggattctgggcccgatggtattctttggctgtgagggcgttctttgaaaacaaaagggaaatgagaaaggaaatgaaatggttggtggaaagattggatcatcgatgtgacgttggcggaaaatatgacaataacactcattggactggagatgagacctggttatcatatagagagtgtggcaacggtatgttcgatcaatgagggtggaacctgtacagttcatgcgtgacccgcggacagtacagggtcgtggtaagcaatgttaaaaagaattaaagcgttcgagacggcgaagaaaagggggaaagagtcggtgaggttgggccttcaggccttgagtttggggctttgtccaaatgttccgagtaatgcaggcaaaaataaacaggaaacagacgaagaggtggagatgagtcgctcaacagtcaagagaaattatacacatgtcactcgtgaacatcagtttcttgcggaaagtgtttgggggaagtatgaggatgggaagatgatatgcctcgcgcagacccatgctgaggaaacaaaataggtggttctatcaagagcaacaagggggatatctcgctgaatacaaaaaaaacaagacaaagtgacgaattaaggtatcatggggatgtcagtatgtcagtcgctagaaagagctaacgtcgggccgggttgggagtcgggaaattgcgccggtcaacttccttgcctttgccgggtgccgatggaccgctgcgagggatgggaggcaatgccttgtctgatgctggagggccgtgtcggctgtgtgagctgcgccctccgacactgctagcctcgccggcttcatccacaatgggaagagtcgaagtcgggccgggacccccggcatctgctgggtcccaaacagtggctaatgttctaggatgtgtgacggacacgtctttcgatgcctccttctccgctgcttgcattgttctttcgacagaagaggatctcgaacttggcttttcagttgattgctgaggtgcaccagatgcggaaccgcgtcgtcgttcggcttcttcctttgacatggtgattcccttgatgaaattaatgaagcgctctccgtagctctctggcgggattggagaaatctgtccccggtcatgcgagagtcctttgaaaaagttctcgaatttcttggtggtcccgtaatgagtcaagcaatcaataataccgaggtaatagatctcgtcaccgggttggccattctcatgagtggctcggaaacctccatcatccgcgtagaagacatgatatttccgttcatcgaggatttcttctggcatcttcgcagctgccttgtccaatggaacaggccgttcacgtttgataagcatgcgcagctcccgggccttgcgttcattctccaatttcgatggagtgcgcatcaggttgttgggagtcggagccgtatcctcttcgcgattacctcctggttggaagacctgaagcgtcttgtcacgcaatttctcttcattgcccctacctgcatcatggatgcctaccagaagagaatagtccattatcttgagcctttgaagcaacacaacgtcgcgtttcaattgctcaaggaagaattctcgttttgccgggccacattctatgtgacggttgcgacgaacccagttgaggtccttcatagttgctctagggtttctttcaagatctgactcttgtagatcacggccaaccgtcgagcccttcaggtcgaatgtctggtggatatcccggtggggcgggaacaggttattcatcacgacgaagtggatctttcggccgtatgccatcttgactcggtgcaatccgtagaattgtgagatgagagtgcttgggttgttctccacgtgccggtagtactcaggaagaatcttccggagaagcttgtgctcggaatggtgaatggtcttgataatgtacttgtagtcccgcgagaagtaaaagaaactcccgctcttgccaggggaacccagttccgacaaaatgtacttgcttgtgagagacataaggtagtcggcaggatcgaggcgaaacttggcacgaaggtgtcggaatacccaaggtgcgtagtctttgaacttgaagtcgtatttggcggagggaatcagttcgttgccggttctgttactgtcagtcatatccaaattgtcaacattacaaggggtacacacatgtcaaaggagaacttgtgcctggcattaaagtccgccggggtgagttcccggtccattttcgcgttgattctcgagaccgtaaagcggataccagtcaacatgttgtatgcggttacatagttgacgtggttctggtccaccttggtgcccacaatcacccggtcgtcgtcctcctcttcgcgacgtcgtcgcgaggctcgcttttgtttgatagcttcggcccatcgggctgcatcttcatccggcggtgtctcatccaaagtgatatcttgctgggtgctggttttcgttgcccgtcgaataagaccgactgacgcgcgtcggaagccggtcgtcggtgacattcggccagtgctatacgcagcatcatcattgcattctgcgctttctcgtcgaacactaggcgttcttggaacctgcaatgaatttcgctgtcgcatattagagttctgcgattctggcacgggagcgacatcgtgtgtagatgaggcgggtggggaggcatgacgcggttggctgggcttcgaatttggtgccaggcgatcagggtctggagaaaaacggccggtctcatcctgctgcgggatctgtaagagcgaggccgacggcgagatcgaagactcatcgtagggcggataactatctccattgaccataagtttcccctgaacaggtcggccatttgcagtgccattgggttgttgactagaaggggatgtggttgtggagatagctcccggtccagtgtccgaaggttttcggtccagcatggcggacggccggccgttctcgcggggatccctgacgggcccattgcctaccgactgcatgctgccgtccttggacaggggcgggtcgcgcgtgtacgagccgacactggagcgagggccattcagggagtatgtactaccgttcttcaggtcggtcaaaaggttcctgtcattctgatgagagtcgttattcgcgtcgtcgccgttgggccagttagtccacaggaacgtatttccgacgggggtcttatcatgcgactttcggactgattcgaacgagcgcggatgagtggctgtggccgtgactgtggcagtctgataggagacgtcgttggagaagacaggcatattgaaatttcagggaacagggtgacgtgagttctgcgtggaccggcaacccgaagtgacggcagtcgcccttattggcggagatccaggaaagttgtgaaccggacggagaaaggggaaacaaagaaagtatagagccaggtgcccagggcgaggatattcaaccgatcaacatcactcagtcaatgcaagggaaaggggagattaagggtaaatgaggtggtgaaatgggggaaatatgggggggtgggaaggggaggaggaagatggttgtctgggagaaaagaattacacgtacaaaatgtacgcggacctccacttcacatgttcctacattcaatgattctatatattagatgttatgctatattctagtacggaggagacatggccacttttattctgattctttatgtagagaatatgtgttctgttcgttgtataaggaaataccaaggtattaggcatgaaaactcagatgtttgatgagcgtacaacatcacgtagtttagcacatcatttccatatattttcctcctttatattactgactactagtgaactagtatcgctttcacatagttactccgtactgccagtttcattctcttcaactctcaaccagttgcatatgcaaggaggtcgtgttgtacaactctatagaatacagtctctagggagtaagttatcaagagatacagttacctatatgttatacatagtcacctataataagatatatcatctactataccattgccctgggccaatacccatataacatactccgtactccataccaatacacgtggagatgcagagtggcgaccaattatacgccaatgagcctatctcctgtccctgaccttgtaatttcttgggtttagggcagggattgagtagatgttattgttcttctgcatctttttctactgtagatgttatatactccctatatgtactcaaagaaaagcaattgttccaaaaatagggctcaataatgaaatcttccgcatctgcgccacaggggaaattctccacttcaaggccaaagatacaatgatacaatgatacaatgtggtaaggatcctctctgaccggcatccccgtcgccgagccccgacctgaacaaattgaacatccgagccgagagaagagtcatactgtacggagtagaaaggtgcgatattataggtgcattcgtgtgcgaaacagactgaactgctaatgtccatatcggagctatctataaagacatgtgctcttctccctcacctctacggagtaccaattatcccaaatttcacttttcctggcatatttcgtagcttcaacccatggtccttaacatcggtagcgacataaccattcagagattgctatcatgtaccttgcgggagtgttacattgatatgtgcatgttcctgtatgcgaatggcaaggtaggatcgcacgtcctaaatcgccactttgtcacatgacttctgtagcccgcaaaaacacggatttggtagtgaaaatccccgttatggaaatactataacaagtatatgactcccttgatttgaccatctgccaattctatcgtcaattgtagatgtataaatcatttctaatactattactattaaatagaatactcttatgattctattcacgataaggcctcgggccgtgatctggttagcccccaccgagtgtacccacaaaatcccaagatcacaccaaatagcgtaagattgaatcaaatgggaatgagttaattagatttcccttcgctagcacttcctatttggcaacgatgggctagtagaggccgaatctacgaactacgtggcgtacttggccatttccgtcttagttggatttatgggaacaaagaaaaagcagctccaccgcaacctcctacaacaccatccctatagttcatgattctggctcaatattgtggctttaattgtagaatattgcatcatccgggaaggtcctcgtttggcgtgagacctgatttgtctcgtcgtgcactatgttgaacctactcaaccttttcgcatagatatagatgggcaagaagtaaacctatcagaattggatgccgatctttctaaggttgttctcaaaaagaggggaaagacacagcacaatctcgcaggagctaaagtagtttttaccggggtagttggtgcaagcagccatatcaggcaagaagaggcatctttcgaggtcattatagttcaaacacggcaacgccgctaaatgcaagaatccgggcagagaacttggaaaaagtatttagttcttgtgttgacctgccagcaacagtgtcacaactgcccatccttccctcaagacttttatccacgtgtttattgcccactatcatgactatacaacaatctcccaaaaacaacacccgaaaggtgtggaaccatgagtttacctggacagataagcacttcacgcccgaagagctgctgccattgagacagcagaccgatgatcttgccgtcgatgctgtgaatcgactgcaggctattgctacaaaggcgaagagcaaacaaagcaacacgggacattgttttggtcgatttgacatgtatagtgttctgaaagaacatcatgaagaagacagtatgctgcaagaactctggcaagaagtaaacacagtccctggatgggttgactggacacaaattgaacgcggacaagagtttatccatcgctatatgatccccaacattaccggacttgctctgggattcctaggcggcaccgcagtgggtaatccttcctttgacatcgtctaacagattgctaacttcaaaagacaatcgcaggtggaacggaggtcatcgtcagaacggggggcttttccatccgtgtcctgcctagaagattcctcgaaagcttcctatggctattgcaagtgacaatggatctggagtctatcaaacccggtggagaaggacacacctcgaccgtacgcgtccgtctattgcacgctacagttcggaatcgaatagtgaagctcatggaccaagacccgacgtacttcgatgaagctaagtatggcgcgccggttaatatgagagacgcaattcatgcgacggctatcttctgctgtatgccgctcttccggcaactccctaagattggtatccagcctcgcccgcaggagacggaggatttcctagcgctgtttcgatacattgcctatatcatggcgactccgaacggcttctttgacggagctgaacaatcaaaggctactatggagagtgtcatgatgtgtgagcctgagccgacagagtcctctaaggctgttggagcgaatttcgtcgctgctatccaggattaccctggtgtcaatgtgtctaagtcaatgatcgaagttggatgccgtgtactgagcggcgacgaactggcagataagatgggattttcgcagcctgggatattttacagggcctctttcagaggatggtgccaacttcttgtggctgttaacgctcttcagcggttgtccccggcctttgatcaaatacttatgagggtgagttggttaaaaaaaaataatcgagacactaggaaaagaatgatgggttcaactaccaccagaatactaatggcttacagaaatcgaaagagttcgtgctcgtcaacgtgtttggggcgtcgattttgaaagaagggaacaaattcgagttcactcaccaaccacaactgaacaaattgaccaagaaagagactaagacagataccaatctctcctggttcaggccggtggagacaatcgggtttgttatgttcctatttgaatgtcttgtttatgccctggcctttggcttgccgggatatgttctctatgcaaatggcatagtctctcgcacttttctacatgtccttggataatgtgcataaatgcttgtcaagttctttcgatgacgtgtgccacttcggtcacttctgctagaattacatggactttaccgtttcttaccgtttttatctaattatagaatgggctaaataaagtaccggtatccgatcgtaaaaaccaagtatattaagggcttgggactttagtatcaacaccatggtactcgcaaagtaattttgtgtacggaatatacgctgtactattttgcattctcaacatagattggactatctcaagggcagtagaacgccaagaagccaggataaaaataactctgacactgacacttgacacgggacagaatgtggagagatctaccgtttgtttacaactttgacataggtagcataactctacaatttcagctcaaaaatccaaaaccaatatgaattccagtaacgatggaattaatcacaataccaaggtaataagaagaccgcagttccccattgcaaaccccaccgcaggacgccatccactggactttggaaagaagcaaagcccataacaaagatatccaaaaaaaaaactatagagaaacaaaaccgaggaaaccatcagagccactgcgatcactgagtccaaagaaagaaattacaagagaagaacaaagaaaatcagtaccaggtactctccctggaaatgcgcacgtgaaaatatagggagagctcaacctggtgaaaaacaaaggcatcaaagcctctacttcttggtggtccgcttcttgggagctgcccgggttgtcgttgttggctgaggggcagtagtcttggtgatacgtccagacttggtctttccaagaatcttaggctgctcaacaatagcaggagcctggaatgtttgttagtgacagagggagatggactaaacatctggagtcaacttacgttatcggtagccttgcgggccttgccagagttagccttgggcttggtggcggtggtcttcttgaccgctgccttcttgggagcggcagtctttgcgacagtagccttcttgggggcaaccttgggagccgcggcctttttacaataagccgggaacatagaatacttccttgatgagagcttaccttgacaatgggcttagcaggggccttggtgacaggcttcgccacaggcttaggagcggccttgacaggaacatccttcttcgcaagcttcagggggccagatgggcctagagtgcgacgcgtcagttaaatggtcgagacatgtgcaacgaaatgcagaaattggtcaagtcgcgcaaaagagaatataacccatgcgcagggtaaatattaacttacccttgggctgagtgaactcatccttctcaacaccagccttgatagccttgttgaactgagagtcaaagacactctgagaagtgacgttgatcttgttgttcgactgaacgtacttcttaatagcctgacgactaaaacaggggaaattcagtcagtggctgctttctgaaatagatggcgcgagaatccagaccgatccccgaggcatcggtgacggaaggaaaacaccagaaaacatacctgctaccatttcgttctttcaactgtacacacaaagggcccgagtcagcaatgaaatccgattaaaactacgaaattgatttggttgtgccatgcccaaaggcaaagacgtgtcacggtcgggcgcgcgacccgaatcacaacaaccagcgcgccggcagagatcaactcacgttaataatggcatccttgatcatatctgtatcacccgaatcagcagatgctcgcgacgaaattcatgtgcatatcgattttacgcgatgtggtgggcgttcaggattagtagagacataccgcggtaggaagtgtgcagagcaggcgccaccttcttggacgcgctggtaaccttcttgggaggcatgattgatgattgatttgagaagaggatgggatgaagaaggtccggttatcaaaagatgagaagacttgagaaaaaaaaaggtggtgagagtgaaagcagaagaagaaaaaaagagcagaagggaagggaaggccgcggggcatccgcgatttataggcgaccggtgttgacaagatcatcggagagatttagaaaaaagcactttctttgggtttttccttcttgcaagttgtcgtccagctggtttttgtttttaattaacgtggtgtttctcttctgtgtgtccttgcgagttgtctctttgcgtgttccaaccttggaatggctgatatggctgatgtctacaggttctctctctttcgtatcagatactgcaatatcatacattgttatatttctttcgatctctattggaatacctaaagactttgtgatattataacgcgacaataatcatataaactggtgaactggtgcttctacgcgtcccctttcccctcgatagaaatcgcgcatactctattttggaggctttgagggcgagccatatctctcagagtagggcagagggagatcatctgttatgcacattccaatgctgtctggggtaacccttccctcttgttgagccgaatctgaacccttgaaacctagaatctagtcgcgaggaacacagttcggagatatagtatgaccttttatatctacaacgttccttaacgcatcaaagcctccttgcttggaggggaacctggggaggctgcattgcctcgtgctaaaaggtcacgttgtaggtcaaagacctgtgacttgtgaccatggtaccgccccttaatgatgtcgagactcgccttatacgaacaaccttctatcttgaatcaagtagtgggtgggaaataggagatggtacttcagatctttttgatcatgtagacaataatgggaaagatagtagctaaataagcagacactccatgtaatacggataactatatatattatcgaaactaacaagacaaattatatttttctagcattccatcataccggtagtatctagataccataaaccataacaaacacaaggtttatgaagcccgaacttcgatcagaacccgggtggcacacgataactccattgtatatatccaagagaggggaaaggctctcacctcagctgcaacgccactacttaatcacatcgggatcaccaggccagccaatcaaagacgcggaatagccccaattccaccattccccgctgatacgcgcccctaaagttaccgagaagaaacaagaaaggtggccgggggcctgggatcgacccgccacagatgtatgagggaacgagcgcgtttgccccaacgtcgaaccaacacagacggatagtaatgaggatctattctcattggactatattcccaatttcctatcgcatgactctaattattggcccatcggcgtagctgggtgacggggatcaccgtatctgcatccgcaaccggcgcgtcgaatcaagggctcagctggcgtaaacgctgatcctgcaccacttaaactctttttgcatcttttgatggtggagattccttatggtacctggtgtcagtatatatcttctgcattcgaagtatttgctgctcatttcgtgaagatcagtcgtagttggtgttgtgaggcctcgagtaatctcgctaatcgggcccgatctatacagcctggacgcgaacactgattatggacacccttgagatagctacaccagagcatctggaaaggagttttgatatgctgaagtgttgagaacagatggaagataatgagtatacagattttggactcttttcccaactgtagcccccaggatcagacggaattcccatgtctgctctacttgatcttgtttgatcctgacgtccaacggaccgaaaatggttactggaacaagagagaagcatcggagtacatatttcttaagttatatttcaaatcagaccaccttttgctacgatacaaggaacttcatgccttgacccgatcccgaggcgaaacggtcattttccgcaataaaaaaaatccttatgcataaacattagaaacaataaaacatataacgccacgccagtccagctcatgttagatcaggaaaattttgtatcataagtacggaaaaatcatctctcgtcatcaagagactaggccgctccacgcggcttcgacttggcatccttcttagccttggcatcttccttctttttcttcttttgctgctgcagcttctcgtcgtgcttgcgcttgagagatgccttttcgtcctcagtgcgagcgacgggcttgaagaatccctccagtcgcgactgctgagctgtcttgagatgcttcgacagacgggcggcaccattgcgcacacggtcctcgttgaagcccttgtccccaaccaggtactcaatcaggccttcaacgttgggagcttcccacttgaagtcgcattcggggtcatcggcaggccggacgtcagggtggacaaaaagttctcgcgcatcttcgtatggccagtcctcaggaacgacaaatttcttcttcgggtcgttcttcatgaactccaggactttctctagagacttgtgctccttgatcaggctgagagcagtggtggctcccactttgggaataggctctaggtagtcacagcctagaagaatgcagagatcgatgaactagacgtagttagcaattgtgactgcgcgtatcataaccagaatacgtacctgtgggcggtccatatcgagaccctcaagcgctcgatccaagtggatctcctggataggttccttgcgctgctcactgaatgtcaagtgccgcaggagaatcggcgactcaaaacacaatgtatccatatcctctgatgcagcggcgtacaccttacctgcacgagccaggaccgcacattgtgcttcggcctccgtcggcgcgttaatataaggaattcccatcagcccaaggagctttttgcactccgcattgtgttcacgagtaacgcggacagtccgccgtgagaacttttcgatatcttccgcagttccagtttccttggcctcttcatgggcctcggtcgcctcggccttgcgtgcaacacgcttcgccaattcgccagacttgagcttcggcggcgctccatcgaagacgtaaagaggtttgatgccgttgtccaccatccgcagggtacggtagaacatgcccattaggtgggatgtggtctcgccagactcactcatgagctgttgaccctccgagcgcacggcgatcaggaaactgtagatgctcatcgacctattctgggttagattcttgagctaccgggacgatgatcgaatgacgtacgcatcctaattcggagagttcatgtcagcaactgaaaatatgtggtaggttatacatttcatacaattgcgaccttgcggccgaagtggttcttgatctcgcccgtcttgatcgcatcgggggcattctcggcgattacctggtacaggtctggtatttatttagcaagaggtatggataatcgggaatagaatacttacgtttaatacccatcttgaacgtgagcttaggttgtctcaagttgaattcttgtgtctgtgtagaagttgagcttgacctgtcgcagtacgcgaacgcgctgggccggaagcgcgacaccatttaaacccaattaggcatagtgtcatgcaatatcacgtgaccggtcaaatccggacccactcctgtcttatcttggcctgaatatgcatgtctgcctcaggcggccaaccggcaatgagtaattattcgggccagaaccggccggtgtgaagctgctccgaccccgcctttctgtattccccggaatgcgccagaaggaggatgagtccaacctccacaccaatatgaagcggaatcgcattcaattcgaggccaatggcgaggcctcgtctgcttctccccctcagggtgtcttcaccccggaggaccgccctcaccatgtgccgaagatatctagacggatacgggcatgcactgagtgtaagcgacacaaagtgcgatgtgatatgaaggcaaccgactcggtatgctcgcgctgtcagcgcatgggactggagtgtatcgtgaacaaaagtcttcaaacattgctggaggacgaagctgagtaagtgccttatcttgggtgtttacatcggtgacatatactgattgcgccgggttatgataggtggaaatcaatgatcgaatcggcaatgacggacctgctcagaaaatcgcagctaccggagctatcatactaccaagcaggcggtggtacagagacaccttcgaacaagagaggccggaaagactccaccgtctcgactgatgatactggacttgggcaacataaaagggccgagccagtcggtaatacagtaaaaaatggcgcagctggaaggtcaaattatggcttctcccaacaacagccacgatattctttagaccgcgaggaaactggcgcaacttctctggtcacagccccgatgggcagtctgtacgaggtgacacagctcagtgaaaaccgcgagagctcgcccggacaaaagcttgccccggaccaagtattggtcactgatctcatctcgcgcggagtggtcgatatccaggaagcggaggagttgttttatcacttcgaccaggtactcaaccgttacctatgggatggagccttgctagcacataaagacttgacgtctgtccgacgatcttcatcaatgctgtctgctgccattttggccgtcaccgcgcttcacatgccgaccaaggaacgcacgtttgatacatgctacaccgagtttgcaaaattggcatcagagtctatgctggaccaccatcataccctagatgatatccgcgcactatgcattggagcattctggcttgctgatgttagttggaagctctctggctatgcggttcgtattgcaaccgagcgcaacctgcatcagttctttcgcaaagccacacaagggtcgccagaacacatggaacaggcgaggctatggtatctactctatgtgagtaatatttgacccaaagtgttgttgttgttgctcatagttttcagaccttggaacaccacttttctattgcatacggccgaccaccgatgatccatgaagatgtcagtatcattcagcacaatgtctttacacaaaatccgtccatttcacaaggtgatcttcgacttcatagccaggtcgacctgttcatcattctcacccgaatgtattttgcattcggtccagatgtcgacctagaagttccagagagcgatttccccaaaattgatcaatacgatgttgatataggggactggaagtcagcatggcttcctagactcggtaagtctgacttcctgagacacagctacattgtctaatatgttactacagcgggaagtcgctacgtcggtgcatatccatacaaggccgtgtatatgcactatcatttctctcggctgcagcttaactcacttgctctgcgcacataccactcgtcaacctcctcaggacaaatgtcttatgaacgcaggaagcgtgctaacatcgctgttgaatcagccattgcgactctccaggtttgtctggaagagcgagacatccagctggcgctcgttggcgtcccactatatctccacagcatgatcacatttgccgcagtctttctgctaaagatcacagccaagatttgctcgaatggaaccattcccgggagccagggcaaacggacctcaatcgcctcggcagggctacacgttgacgtgagctacgtacgtgttctcgtcggacggatcgtcgagctcatggtctcctgtagtcagcgagcgagcgagcgccacctgagtcaccacatcgcccggggtctccgcaagatgctgactgggcttgaggaatgggagaagcgcactgctggtacccataccatggggttagctgcacatgaatcccattctcttttcaagccggtggtaattcctggagcgcagatgctgggtgagcgtgacactattctgaatcacccgcctccattgcttggtgtggcaccgctgtccgccgaacgcagcaatgggtttgaacaccctctgaccccagggaagcacgagcccggtctatcggaaggctcggttgaccctatgatggcggatctttggggatttgacgaggattatttccccacgggagtgtttgacttccttcagagccagatgccagcgtgatccggacttggaatgttttccctgggctgttctctttatacatagtaataaacggcctatgattgacgatcacggttgttgcaggagaatatatgaatattagaaacatacattagagtgaactactaattaagtcggactatatctccatacttccttaataaatggcattgcccagtacaacatatagttaagaatggatgggaattcgacattggacgccacttgatccccgtccgttcttttccttattttgattcctttccaattatcaccatgcgactaagatacatatgctctacggactccggagtataacataccttgtctctcggtgcttggcatagagccacccggtagaccgaaaaagtccgagtcggttgaacatgcggaaccaaacagcccatttctcggggattctgtcgaatcacattggactagattaatacaaaagccgacttactgttgatcttgtaattccgttattcctggtgtattgcactcggtgattccatttaccccaaacttgcaagactgccgaggtatccgcatatttgatccagtttccgcaacaattgacaactttattctctctccactctgttcaattgtccattctctgttttagctatgatgaaccgatctcttcttcgcgcagctgcgcgctcaatccaggctggtcctacctccgtggcaggccgccggtacgcctcctcggccgtcttcaattgggaggatcccctcgtcgcagcggacctgctcacagaggaggaattggcaattcaggagacagcacgccaatactgccaggataagcttgcaccccgcgttttgggtatgtttaattcgcttgcttctgtgaaatgatggactgacgtcagtgacctccttgcagaggcctaccgcaacgagaactacgaccgccgaatcctagaagagatgggcgacctcggcctcctcggagcttcaattgaaggatatggatgcgcgggtgtcagcaccgtggcatcgggcctcatcaccaaggaagttgagcgcgtggactctggataccgatcaggcatgtcagttcagagctcgctagccatgaccggtatctacgagttcggcacagaagagcaaaagcagcgcttcctgcctagcctcgctaagggcacaatcgccggctgcttcggtctgacagagcccaaccacggctccgaccctgggtccatggaaaccgtggcgcgggagcaccccacgcagaagggcgtgtacctgctcaccggcagcaagacatggatcacgaactcgcccatcgctgacatcgcgctcgtatgggctaagcttgagtctactgggaagatccgtggatttatcgtggagcgtaagcgtgcgacgcccgggtcgtacgagacccccgctatcaagaataagactgccctgcgtgcttccgtcactggtatgatccatatggataactgccccgtaccggcggagaatatgctgcccgatgtcgaaggtctcaagggtccctttacatgcttgaacagtgcccgtttgggaattgcctttggtgccatgggtgccctggaggattgtcttgcccgtgcgcgcgagtacagtctggagcgcaagcagttcaagggcaacccgcttgccaagtaccagcttattcagatgaagttggctaacgctgctacggatgctgcttacggaaccctggcggcgatccaggtggctcgtcttaaggatgctggcaaggctacgcctgagatgatctcgatgatcaagcgtcagaactgtgaccgtgctctggctaattccagaacgtaggtttctctgtcttttatttttgggttgctttactgacatagtattagtctgcaggaaatcttcggtggcaacgctgccagcgacgagtatcatatcggccgccatgtggccaacctgtttgtggtgcagacctacgaaggtcagagcgatatccatggtaagtcaaccctgcctgattgtgttgggctgaggctaatgcatgtttcaagctttgatcctgggccgtgccattacaggcaagcaggcctttgtctgaacataaaaagaacatatttgtatatagactatatcccaatcgaatgtttcaaagaggtacaccgcagttctaggagtagccagtaagacatcaggagctccccctgagaagtatagggtcacgctatcaaaggacagttccttcctctttgggacaagcgggaaattgcggacgcctcacccgcacgtgacatcatcgaggggcagtgtatcagtatcatgcggtgtaatacgggtttcaatacatacagaggtatattgaatgggagaggattggatatgaagtgtatgacatgactaaaattggacgtggccatgttagaaatgtgtatatgtgtctacccggttaggcactgctctctatgtatcaggctggtcacttgaaatatccacctgtctgctaatgctgtcttgtatacgggatactccatatatgccttttcctgaccccaaattcgatcagccctaggcattgcctttcatgaagcaatactcaatcataatatacacacatatacccttctatctacttctgcctcattctctaatacctcaatgaggtaacccagctgagtcatcatgtgtcaagtgggcgcccggtaattacggtattgggtcgtacaataccgacagaatcgattccgcccatgggggcacttttccccctcttcctcttgagactcccaattatcttcttccctcttctttttccacacaaaggcgtaatcgtaagatctgctttatctttcactctgagcatcaactgaccacccatcacccagcttcttttccactttcttcacctttctctctttgctcgtcatggctctcaagcgtattaacaaggaactcgctgacctcggccggtaagcctatcctgatgctatctctgctatcttcttgtggttcatgaatctaactctcctctagggatccaccctcgtcctgctccgctggtcccgttggagatgatctggtatgaactctgaaccctcgttttcttgctcggcgccatctggcggggcacaaccccggctttgacaatcttgatatcaatgagaagatcgtggatggctgacttgtcatttttctcttacagttccactggcaagcaaccatcatgggtcctgtaagttgttctcgtctgtgctttggaggaccttggggccatttggccctttgcgagctccggagattcatcaccagatccatgatactaatagatcatatagggtgactccccatactctggcggtgtcttcttccttgccatccacttccctaccgactaccccttcaagccccccaaggtcaacttcaccacccgcatctaccaccccaacatcaactcgaacggcagcatctgcctggacatcctgagagaccaatggagtcctgctctcaccatttctaaaggtgagcaagaccttctcctttcattctacacagtttctaacgacccatagtgttgctctccatttgttccatgctcacagaccccaacccggacgatcctctggtgcccgaaatcgcgcacgtctacaagaccgaccgaccccgttacgaggcgacggctcgcgagtggacgcggaagtacgctatttgagtgaaacgacaaatctgattactccttcgcttcttatgtcttctctatctatccctcaataaccctccttgcgacccctatttcgctcgaccactttttatcggtgtcatttcaacgtcgctctgcatctttccgctttcttgcccccgctctagattcagaatccgcgaaagcctggcgtacctgtggtcgtagaaacgttttcagttttcccaaactcagtgtgttaatttcaaatgcacctgttcttgcgcgcgtttgcttcctacttcggtgccgaaaactccatttgcgccgggtttgaccttgtttgttgggctgagtttctgggactttccatatccaacgatccttatgacaaattctcatgcattcatggcatccatttctctttttttcaaacgctccatgcgtctaggattgaattatggacactgccgagtttccgcaagttcttcttttgcttgtactagcgatgcttcagactcggtgggtaatgcttggggagtttcagagagtagttcgagatcgcccttgtcttgggtcttgcgcttaggggttataaggggctttatcttttcctatccaaatagcacaatctaggcagggcctatcttgtgtatgagcttttgatagtgtagactgtaatttgtacgtcgtataactacaacttcaaacactgattgattcacttgatgcattccaattgcccaactccaaatccaaactccctatatgtgtatgtatgtatatgtatctgtgtaaatgcaaataaaaaagaaatgaagagtagaaatccatcaaatcaactgtcgtaaaccatgcgactgaaccaaacccagactcaaaacaagtccaagcaagtccaggacgaaaagaaagaaagaagtaaaatgcaaaataaatcaaacctagccccctaaaaggaaaaaggaaccaggcagacctattcaaaacatgcatcatcaaaccgcctgacttccccgtcgactcccagcccgcgacccctccttcgcagtgcgctgactagcccgagaaacctgactcaccgaatccgccgggctgacacgatcatcagccctagagctcttcgagctcccagaccgatgcgagcggtggcgatgcggatgcaacccaacctggctaatcgagtcatccggcgagacttgcgaggcaacgtccagatccaccacgctctcaggaagcgggacgttccgcgcagagaaatgcgacttcccgccgtccctgctgtggatactcgggctggagtagaatgttgcgttcgagccggtggggagggggatgttgcgcgctgagcgcgaggatgaggcaacgctagcgttgtccttgccggcgtgcgagtgcgtgctgtgctggctcttgtgcgagcgtgacgtcgtgctctgcggcgctttgatcgttgaggagctgtgcacgctgcttggcgcgcgcatcttttcttcgtggtagctgctgatgaaggtggacggggcgcacgcgtagcgtttctgtgaggcgttgctggcgggtgggtactcgattgcccggagcgggatgtcttctgggatgctgtagatgctgccttctgaggcacggcgagggttttccatgtactcggagccgtcgtagattgtgctggcgcgagggttcttggaggttacgctgcgcgttagggttgagcgtgggtttgaggcggtggtgtaggcgctgcggggtggtgcaggtgcttcgatggcgcggaattgggattgttggtcgtcgttgccgaagaaggactgtgcggcggctttgagttgggggaagctgtttgcgaactgcattggttcgtgttcttgggccgttgactgtgagtcgcctttgaccattgcgtaggcgatcgctgctcctgcggcggcgccgatgagcgtgccgacgatggtcttggctgccatgctgccgtcgtcgctctggggcggtgcgtgcgactgcatggtatatgacggtggtggcgggccttggaattggcgcgagaccatagatggtgccgaccgctcatagactgagggtgctttggaacctgcgcgagacttggtgtctgatcgggcttcggatcttgcttcggatcgggcttcagatctcgcctcagatcttgccacggatctagtgtcggaccttgccacggatctttcggacatagcctcagaccttgggggtgcgatgctctccgccttggcagtgctagctctactgctcgcccttgagaccacagagcggctagaaccctccagcagagccattgtcggcccgctggcggcggatatcaccgaggcagcgccaggccggtagacggcttcaacgctgttgccatcgaagtcgatgacggctgcactgaagtacccagattgcgaatctcgcattttgggttcgccgtggatcttcgcgccggctttaagggcgcttatgaagaacgagccgacagcgtctttcgacggggctgggaaggcgacatggactgcgccaggaggacatctttggtttaagttagctttgtcgagagactgggtttctatatcactcacccaggcttagtctcggtcatccagaaatcagcaggttccccctgcttctgaccgaaccctatatagtcatcatgtcgaccgatgaattggtatcccaatggctgtaaacatgataaatagaaagaggtagaggtcgggaggtgagcgacagtcagggtgatatgcgagacaggcattgcgaaggttgaagtgagggtgcctggatactagcacgtagagtaaaagagaacagggatatgaaaaaaacgaaggtggctggaaggaaaagagaggttgaatggagtcggtaaagatatatacggtgaaggaatccaagtctatagccagaagtatgacgccgggaaacgaggccacatgaacagttcccccaagagccagtcagaataaatgccgtgtgactctaaaccaaaaacagagccgaaactaggctagcagcttccaaaatcctgcccaagctggcgaaaaggtctcacccagaacaccgcatgtctcccctcgatagtaggtgggcactgaggaacgtgtgaactctgtatggagtcaggccagtggggtccccgagacgattggccgaacgatcaagtcaatgctttggacccgatctgcacgggatatttgaaacggtccaggacgaggcgtgtccagggcccaagttgcattccgtgctccatacttggtgagcacagaaataataatgccagttcgtactcccagtagcacggtactcagaccggaaattgttcctgttcctgtgcttggccgctttcggatacctcggggcccaaccttgggaaagtgaaacgctctatggctggaagggtgcagatgggtccctgccaggtcatcgcggggagccaatgtggattcctgttggcggatggggcgtctgttcaggatgccctgagcgaggtgcatgagcctatcgacgttaagtggacattttgcttacttgttcctctcgtgtagcaaatggcggactttggagtggaggaagaggagatttgccaggtgggcttgggtagatgtgctgaccgctacggggttgagtcatatgttgtacagtagcagagcaactaactatggagtatgttgtacaccgtaagtcgatatttggggataattatgagaatatgatctagaatgctacgatctctacatctccaaatataaaatgggcagaagtgcatcgcctatcgccaccctcggtccgattcgcgtattcaaagtgaggcgaggctagttgcatgccacgtcaatcggaattattgggagaaagagaggtgaaagtaaaaagcaaagggaaaaagtaaagttaaaagtaaaaaataaaaaagccataattgtattgaacacagaagttgaagatatgtgtctcaggaatccccaaacgggccctgacctatgtgctgttcactttttctggtctacacatcgcagcgaggttgaagctggatggaggcaagacgaatcaaggactggcgaaaaggaaccaaatgccatccgacccgtaacggagggggaaaaaagacccaggtgctctctaaacacccgtacccttgggatgaaaatcccgatgcttggtagtcccagtatgttgtatgcagtatttccagttcccccaaacaaaacagagagatatagaaaggcagagagagctgggcttggagaacagccaaaatatggaacaagaacagatatatgcagagatatgatcggtagcttcgttccgggcagctcaatccccgcctgtaaaaaaaaggtgcctagcaaatgtgccgtcagtacagacgaccatgacgcgcgctcgttgggcgcgatcctttcttttctttttccagttgagtgtctcagagaatatcccagacctcttcggcagcgtggcagaacttgctgcaggccacactggcactaagactgtaattactgatactgatggtttcatccttaaaagagtccgcaaagtcgtcgtttcccttggccatggcaccgacgaagatggcgacactctcattggggttcagcgtctctagatagtccttggtgcggaccacgggcgcctcgaaactcatggtcaccttgcggcagttcgggggaagatggtcggtgatcgggttcttgataaccttgagaagcttttcttgcgagttggtcgaacggatggagagtcggtggagcagttgcaccatgagaccggcgaaccgcttgaatgttctcgggatacggacggaagggttgacttcgatcaagacgcccttggcggtgtggatgaaaatttggagccgaccggccttgttcacgggggagtcgagaagagtgagcagacactacgctggattagtggggattctttgaccttgctattgccactggcgatgttgaatcgtacctggtgggtaatatccggtcgggcttcactgatatcgcggttcattttgcgcatgataccgatgtgctcatcgctgttcaacagagagaacttctcatccttggttcctgaacgtccactggagacagccttgtaggtttccagactggcattggagaggaccacaatcaagcgttgggtgttcttgtcatggggaggaattggcatatgctgttcggcgacgagctggggaagctctggaggagggcatgattgggtccctggcgatgaaaagtcagacatggtgaagttgagaattgcaatttgggcgcggggaggggtaagggaaggggggggaaaggtgacagatgtggctgggatgtgatccgaggggatcaatgcccagcaatatgtcacacggaccaaatcagaatgaatccctggaagaattgatgttggattttgaagggttggagtcgtctgtagttgcggcgaaaaaaaatcaaacacagttgaagagattgccgcaaagcaaggggaaaaagacatagaatcaaaaggaatacatactcgcacgctttctctttccagcagcttgttcttggtccgacattgttggtctgaatgtatttgcaagatgtttgaagttgaagagtttttgggggagaaaactttcggggaaaaggcggccccaagaaagtcgagcgtcggaattatatagaaatctaatgcgtttctacgtaactacgcttctcttttattgtttgttagaatgtattcttcggactatttacagtctcaattgcaacataggagaatggcaggtaaaatataggagtccacgcgtatgtatatcaacatcggatattgtagttactcgtactcttcgatcaccttggaaattcccttttatgttagcttaacggcttagtgccagagatcgacattaactagcccctctacggggtccatgtctgtatacaattccaacagcgtttgaatcatccggaaagccacatcggcttctcttttgcaggttgataggtccaacatcccaataatagcaaagcgcctgacagggatgtaccaactcaactcacttgggagtaactccctctgtactagccctggtacactagcaaggttggtacctacagtacagagtcctctctggggcatgaatattgaatatcagaggattgagttcggatgatgaggatgtgtgacattcttgcataatactgcggtggtgactcagaatacactgatctgactggctcatgttctagcaatgcctcttgggggccgtacaccgagaggctgctacccagtggatgagcagggtcagcacagatgtgaggccatgaatggatcggaatggcaaaggtgatacaaggaagctttgtcactaggcagtgaatctgccgaacaaggagcagctcttctggtaatctttgaggcagttcagagtgcctgtgatgcctcgctcgtgatctggaccccgccggtagcgaccggatgaatgtgtatcatgtaggctccagcacaagctctttgcacgatgacatgccaagggctcagttgccaccaagtcggcactgtgagagtgaaatccggggggagcccatatgtgacctggtaaccttagccagctaacatcaagccaatcacttgagctcgggacttgacccaatcagcccggaagagtttgtgttgggttggcaacgccccagtattccctgtgatgaaaattaattgcagcctataaccggtcagctgtaggcgctggacatgaaaaaacagagcggtcaatgaggatcatcacaattccaacgtgggcttccttgcacgatgcaatacggggaggccttgcacgccttaatcagaggccaagggctcaggagagcgtcatctttaatctccctgactttggacttatcctagaccagagaagccccattggctggaattttcgattggagcctgtctgttgtgtgttcggagcactgtgaatcaatttaagtagaaagggggcgaaaaaaaagtgcccgacataccaaccacaggaattcgacaaggctggtgttgtgtgttatactccatttattgcatcttcacgtcttcacgtcttgaatttccccttcttcatcttcttctcttaaatctctcatcttccgcatttctccttggcccggtattaatcccggctggtggcgagactctcctttttttcacaaaacccagctctccaccaactattgatcgcttcatttctattttttttatctttttctccctgaacttgaaactgctctcaagcaaacctgaaatcctcacagtcagggatacaagtcctaagagctctggtaagccaacgctcgtcatccaaaaacaatatgtcctaaaacagactagcgtccacgcgtgccgtcaccgaggactttctcaacttcttcatcccaccgtcagcagcttggagcttgtcaggagcaaattctttggaaagtcagggtcatgccgtggatagttaccaattcatttaagaggtatgttggtgtggttctaatttacccaagggtagactaacatcccatttcagaggcctcatgaaaacttacggacgaccaacatggcgcgtctacgatgatgagcgcgccgcgaagaaaagacgcgtggatgactatgatgaagctgaggccaatctgcaatatgctatccgggaatcttcagctgccgtgctgtcgagcccgtcgcgtcgtaattccgtgttgtcggaagacacgcttgatgatattgacgatctcactacaccaccatcgtcgccaccaccaagcttaaccccaccaccagcaaacacccgcaagccggcatttgcctttctcaagcgcaagcacaaggaaactccgaccgcatcccccttgacagaggtgaactcgaatagcgtacgcgcatccgtggacccaccaaaacaaaagggtcagaaacaacctgtcatgcgccaaatgcagatcgacctgggaaatgatacacgaaagacctgtgctacctgttctatggaatacatcccatccaatacagaggacgcggcactgcataaaaaattccacgagatgaatgcgactgggatcgacctgggcaaggcatttatgcgtgccaacgcctcgcgttgggtttacgaagcgactcgatttgacgaggggtatgtggtcatcgtagaccgcaaggcgtcccctagcgccaagagccaagcgaagaaagtgctcgaggttgtcaataaagagctctcctcaccggatatcgatgacgagatcctctggagccaaacggaaccgcccaagcatttgcaaaagggctctcccgagaaagtagaccgttaccgagtcttcctgcacatgaaggacagtcgctgtgtcgggctctgcctaaccgagcgcatctgggaatgccgaccggtggtcaaggaacagaatggcgacgcacccaacggctctgtctcaacacgagaggaagtctgcccggccattgtcggagtctcgcgcatctggacttccggctcctcgcggcgcaagggaatcgctttagatctcctcgactgcgtggtcatcaactttatttacggaatggaaataacaaaggcacaaattgcattcagccagcctacggagagcggcaatcgcctggcacataagttcttcgagggtgaagagacatggcatgtctataacgagcagtgatggggttgacttgaatatgggaggtctttcttttctttaatttatctcacagcaatgagcgaggcatcgggctttgattgtgttctcgagcgtgtctttttatcttttatatgcttctgtaccatacctggacccttttcccgtgtaccatagggagctgggacgcattcgtttcaatattccaatttgactgaactattatctccgtacaagaacaatttgtacgtcttgtacttctttttatgcattttatttaagcctcgggcagccggactcgatctcggaaagcggcgcgtactgggaacctcatggataagaaactcggcggggacccctcaattcttctctttttctttttctctcgattctaacgtattcattctcgcgatgcctggatcaaatccttttcgtgttagaaacctgggtgagtattgttttcccctcctcttgagccttcccggtaacacggagtcataacgtggcgctgatgtcaatctggagacacaggcaatcccgcagctccattgtctaccaacccgggcaccttggcccctgtgccttctaagcctttgtccactccacctatagccccgaatggttatcccagaaagtcgtcgataccgctcgaacgcgaggtagctgactcgagctcctcggacgaagacacaaacccattcaacctgcgtgtgtcggcgagcgagagtgaggacaaaatcaatgcacataagagcccagctccccttgaggatgatcgacaacgagattattctgggtcagctccacatctagctccatcaacagatggatcccccatatcacccgaccacaacatgccgtctgcgacaggcgcagacagcttctatacaggacgtcatgcacggtcgtctatagagcttgatgcaagccccctcggccgagccagagacaagaagccgccacctccgcctaggagtcatcacggccgaagaatcggctctatagctaccgcagaatcatcccagaccgctcggtccaggtctactaaccgcctgtcaattcctggctcccctggaaatctgacgcttggcacctcgcatcccagctcggtgtctctgtcctcggccgactacttctcggtcactgtagcgacagggtccacggactcgctccagcgcagccagtcccagcataagcgtcctccgacgccacctctcagtcgacggcacagccagatgcggagatccaagtctacacagtccaaaattaccagcagattaaatatgtcttacgactcggagagcaatgatggctctctgcctcccagtccggacccttccagtcgggtggaaaacaagagactcagcatgcctccgccatcctcgggagacttccaggcgactgcgccgttgggaaatatctcactgaacctgtctccccccactaactccagaccatcatcactgaaggctggtcggcggacatcatcctatgggagtgtctctggaccacctccgcctcctccacctcggcgcactcgagactccattgcccgtagcagtgatgtgatggggttgaaggagaaccagtccccagccccagttccagtccctgttccagccccagccccacaaccatccaatgcccttgacatcctggctgatctcaccaaactgcagaaagaggtggatgatcttcgagggcattatgagaatcgttagtgatcgaagggggcagcaggctgttttctctcacgttttagtataggagattgcatacatgaatgaacgaatgcatgaatttggcgtagtgattaccagtattgaatttctggtaaacacctttatggggaaagatgggcgggacagatattaaccatatggtggctattagtgaccatcacgatagctccggtttgtataaaataggggcgaaatataactatctaatattcattttcgaccgagtaaactggataattcagtatctcgtcaagaacagagcccctctgagtggaatagccgatcaatagaccaggtaatctcctattaatatggtggcccgcagtattgtccccatggccgttaactcgcgcggtatacgccacgaggtatgacgtggggggaaattaattatttagttcgcaaagtccagggccaagtccaccctccttccctctttctctctcaacttctcttttgacaactctcgcattactgactctacttaatttctaaagaattaatccatcttcatatcttcgcatcatgaatactcccacgctgatcaatttgcctcctcccccatcggaccccgtcactccatcggatatgggaccgtaagagctctctataactccatcttccctgtctctatacgtagcatggagtgttgactgacttgctaatcaacggagaaaatcagaggcacccccaactccggcactacatcgctgtccgctctttcgacaacagccatcaaagatggtcaccagggccaaccattccctcacagccaccatgcgcaccagtcctccacatcctccacaaccctagaggctgaacgcgcagaccgcatctcccgtctagcgggccttgagcgcgttgccacagcccgcgccggtggccagacacccactagccagcttctgccatatgctccaggatacttcgagagtcaagcactgaaggagcgcagcacagtcggcagcgccagtgcgactggcagcatcgccgggcgcacaacctgggcgagcagtagcgacacatacgacgccgacaagatgagcgagcacgaggacgacggcacttccagtgtcagtaacgtcagtgatgaaggtaatgccagtctcgtcggttttggcgagggcgccaacagtacttacagcgggccgatttctcgtccgcctggaatgagccgtgtgtcctctggaggtattgcaggacgacctacttctatcggcagctcgaatatcaatcgcccgaactcgctggcttcatatcttcagcaacaacagcaacatgctggggagagctccatgagatcgtcgtcgccggctgggtcaatcactcccgagcctatcaatgaggatgctcgcatggtggatggtatgacttttgactcggatgtcgttgatactactgtcagaactccacgactagtttctacgcccggtcacagcagcagtggatttggctcgccagcccgggattagtgtctggttcatgctttggtagattcaagaagttacgaaggcgtttttctttagtggcttgatgcctcgaatggatagctttttttttttggtgtctgtttcgaattagcaatgactacgcatgtaattctgagagaaacctgtgtattgagactcttctcttccaattattcaacctgtcgttggtaactacctgggtcttcactctaaagaccattgccacctgtcttttgcacctaaatctagacacctagacactatccttgctatttaacatagaataatataccagcaagctaccatatagtctatcaagctccaagccaagcctaaagcccataatctatacaatcggtgtcccggcacaacgcgtatactgcagatgacggcatgccgcctgagccacatcgccaaacccgagttttcttcctttcacttctcaaccaccccaactacctttcttcgcccgaccccttttgctggcattgacttgtctagcagtcttctattccgccgacttgctggtttcacttgcccagaaaccccacgaattcccaatccgagaaatacccccgaaaagcccgtttcgcttcgcctttgttcgactcccgttatttcaccgggaccgttgttcgctgcgagactattttggtcctataagttcgctttgtgattcgtgtttcttctttgaagattccattttactttgtgttcccgaaaagcattcgatttctcttcttttggtggattcattctagacccgcgagtcgaaatcaagatggctgctcctacgcaacttgcttgtacgtgttttccttccatcttctatgtccctgacttcaggtcgcatttggctatgcgggtggatgaatggttgctgataaccacacagtccgcacgctcaagggcattagcatcatggatgccgcccctgtctaccagcccctttctgggttcgcgaagtaagcattgagccagataacaaacaagggatgtcgctgactcgtttcccagaccggagggtaacctccgctgtagcggctactcgccgtgtggtcggtacttcgcatgggcatcacccgagaagtaagttgacttgccccccaactccacgtccaaattctaacattcgtctccaacatagggtcaccattatcgatccctccgtgggccaagtcgttggaaccatccccgccgagaacgtgttcgagcttggattctcgccactcggcacctatgtgatcacctggcagcgcacatccaaggacgagaacggagatgccgtcaagaacttgaaggtgtggcgtgccattgaggatggggacgatcacacgattgtgggaagtttcgtccagaagtcgcagaccggttggaacttgcagtacactgccgatgagcggctgtgcgcccgtaccgtgaccaacgaggttcagttctaccagagcgacaacctgtccactgtttggaacaaattgcgcgtggagggagtcgcggattttgcgttatcgcctggtcagagtcagtccattgccgtgttcattcctgagcgcaagggccagcccgcccaggttaaggtgttcattgtcccgcagttcacttcgcccgtgtcgcagaagagtttcttcaagggcgataaagtccaactgaagtggaatgcttcgggaactactttgatcgtgcttgcgcagactgaggtggaccgcactggcaagagttactacggcgagacaaccctgtacttgctaagcgctagcggtgcattcgactcgcgcattgatcttggtatgtcttctcactatactacatgttgaactaactgacactccacagataaggagggtcctattcacgatgttagctggaaccccaactcgaaggaattcggtgttgtgtacggctacatgcccacgaagacgaccatcttcaactttcgcggtgtgcccaaacacaactttccccttgcgccgcgcaacaccatccagttctcgccgcatggccgcttcgtgctagttgccggtttcggtaacctggcaggacagatggacatctacgatatggacaagaactaccacaagatcaccaccgtcgaggcctccaacgccagcgtgtgcgcctggtcgcccgatggacagtatattctgaccgcgacgaccagcccccgtctgcgtgtcgacaacggcgtgcgcatctggcacgttaccggcggtctcgtctacaacgaggagatgaccgagctctacgacgtcagctggcgcccgcagagcatcgagcagcacccgctaggcgagccgctcaccaaggtgcctgcgccccacccctccgctctcgcgtatatgggcacgcgcaaggctcccgtcaagcccgcaggtgcctaccgtccccccggtgcccgtggccagctgaccccgctcgcattcaagcgtgaagacgaaggcggtgccgcctttgtccgcgatggcgttcccggcgccagcatgaacactttcggcaagccccgtcgccgtgagatccccggtgccgagccctcggaggagtatctgcctcccggagccgcacccggcggcggcgtcgccctgcctgccgagaacctgtccaagtcggccgcgaaaaacaagaagaagcgtgaggcggccaagaaggctaaggaagaaggaaccgaggttcccgcgaacgccccgactgcgcccagctcagaacgcagtcgtaaccgcggcaagaatggcactaccaatggaaacggtccggccaagtccacgcctactcctcctcccgctgctcctgctcctgctcccacccctgctccccctgctcccgtgtctgttgaggattcctctgctcaagataagaaggtccgtggcctactgaagaagattcgcgctattgatgagcttaaaatgcgtcttgcaggtggcgagaagctggaggacacgcagatgaagaagatccaaaccgaggatgcggtgaggaaagagctccaggccgttgggtatgatggttgattggaattgaacagagaatgcgtgatgcttgatgctcgacgcttgacgacgttatgcagattgcacccttgcatggatatacctatcgacccgcgtgtattgcatttggtataggagctgttcaggttgatatcgatatccgtatcaatatcaacaccactcactatcaatataaacttgaaatggctcatagaatatctgtaacagtagcctacaaatctaaatttacatctatctagaatatcacacatccaaaacagtcgatctgaatctagtcgaccagaaaagaagtagaaaagaggtgatatggcggcacaaaggctctcgattgtctgcgatgaacttccaggaaatttatatttcagaagaaagaattagaaatacacatagcattgaagacctgtctctcttcctaatgcgaataaaattatatctgattctctccctcaagatctccgacctgaacaccccaaacttgccacttagcttcttcaacaaagtccctccgcaaccacagcccagacggctgaccctgcgtcgaagaaagcagccctctactcgaaagatggtcgcgttcatcgccgggctgagtacgatccagccaatcaaatagcaaacgaagctgccagatccgatcacgaatttggtccggatcagcgccgcgaccgcgtgcagattgcacgatgttgcgcacggtgtgggacagagcgagtctcgcatctacagctgaggtacgcagccaaggtgggacggagacaagatcggtggtgatgcgcacggagcgcatcgggaaggaagatgggaggacgagggagcgctcgcgtatatcgaggtcttgtagggatgggaggtggaagacccagtcccagggggtttgggacggagttatcaatgtagatgccttaccggtgagtagggccatgcgggttggccatgctgagggtggcaggcccttggctgggtttgagaggggaccagccgttgctgggaggatgtcttgggcttcgctgagcccggtcagggtggaggcgaatacggaggttgaggagcttggactgtaggttgccttgcggcgaagatagatggatgggtcgccgcggaggaatttctcgcgcagggcatcattctggctgaaatctagaacgagcggccagtggtctggtccgcgaatctcgatacgggcgatgctgctaagatctggcagtagacagggagcgctgacggtgcgggttgtctcgtcgtgagaagtgatggtaatggggatcgaaattgggcggcgggaatcaagatcacgagggatgaggcatcgtggttcagcggcgagaacccaaagatggcggaaggcttggagatggcatttgttatcaaggacagtcgttgggaagatagggtagaatgcgcatataagcgcggtcacagcccggttggatgtgccaagtgtatagctacctcctccaaggaagagcactccgatagccatgtgtgccgccatgtgactgccatatggtgtatcagcgtcgattcgaccatggagcgagcgcaggcgccggaacagagctagatcacccgtgccggccatgactgccgcagcagatagggctaccaagtcttgacaattccgaaccgaattgcgggcgagtctagcatcgtagcttcgcacaggcagccgtgagatgcggataagctggtctagataaaacaacaaaagatctcgggcctgtgcttgtcccgatccagcatggcggagaccgaccgcaaagcagaggcctgcaataatgttgaagaatggcatatcttcgctgcgcagccggcgcacctcgctgagttgggatcgtccccggtagacttcgggcagactctggctgatccactcagcagtgggcttgatactatcccacatgatcaagtgtcgtgccagtgttcgtaacaggaagatatctggcctcacgtagtcgaagcgaacagtggtatcaggaatgtcaatcttcttcgctagtaccgagtcattcgtcttcatgaagataatcatgagagcaatggtcgcgccagccgtggcgcggtcgagtacatgagcgatttcgacggtcttggtacccacggctattgacaatagccgttcaacaatgtgcatatcgcgcatgccccgcaagtcatcgcctttgccaaggttaatgaaaccgagggcaaagcctgcggccagacgatatccttcgtcgcggagttcttctccggtagcagcagcttgctcgtcctgctcactgttctcgatttccgagagcatgacctcgctcatacgacgatgctgggagccacagtaaagtaaaccgatacccataattccagcagtctgagtcaacggtgacaggttcagctcagctgctccaaatggaagcattcttgtaacatgtaccgaaagcaagcgtgtgattagagtatccattgtgcccaagtatgacgcagagagaccgagcaggagaccaattgatgtcatggtatgctttggagtgaggtacttgaaagctacccacttagccaacgatttaagatggccattcagacccagagccaacaagaacccggcatgacggttggtaagatcctgtggcttgttgaacaatatccacgacgtatcaatacccttcgacgccttggagattgccagaccggttgagactccgttgtggaagaaggcccagcagaccttttcttccgagaacgcagatttatctgcgctgacagtcacattgtctggcttcatgacacactgcagggaaaatgaagggatgggcagtttctcagtcaacaaaggcaatcggccactaaaagtgagcattgcacgacccgctggagtagacaacgtccggactgtcacgagctgcacgatttctttctgcgcctctaacaagtccgaatcactccagccaggttcggctatgcactctgccaccggtgctttggactggtttagtagtttacctgcttccacaaatcgcttatcctctcggaatatcagcctggtgaccgagtatcggtcagcctctgcagaagcctcaaacgcattggtggcatcaatatccaatgctgagctgctgatataatggaaatcccggacggcattatgattgggctgctgcggcgctgccaatgaactgggttgggccgggttcatcgacatgtaaaggtcttctctgtcaatcatttctaggagcgtggcgttccaggacgtggaggcttcaatctggcattgcatgacggcttcatagagcggggcactgacgccttctgggaagctatcaatgacactctttgtgaagccccaacgctgcaaaagcttgattttttccaagggcgtcgatacactgtgaacctcggtgaagaatccattcaacgcacacgtccttggtgtgataccgaaacattcacgccacattcgccctttcctgggagttcgctcggctgcattcacaatatcaaggagagaaacaaatggtgtggggctccgatgagcagcagctcccatgagaaattcgaagatggacggaggcggaaagggttcggcgggaaccttcagcccagcgatatgtgtattatcctcaaactgccagcgctccatactggccatttcggtgccataatatgcatcctcggcccatgtccatgattcccatcctagccagctgcccagttgtgcgataacgggagcaagcaaacctagaggtctttgggattcctccgagtcgcaggtggagagcttctgttcttctcgcaatagatgcaaggctacaagaacactgcacaatgcggtacatcttgtgttttccgagaatgcttcagagatagggagatagccgtctcggccagcagccctgaggccttcgggactctggaggaattcgcggctgagggcgatgcaccggatcaagtacgaattctggcgatatgtagaccgacttgcattgacacccttgggtgcgtctcctgacgcgagactctcaattgcatcttgttcaacgatccatccccaggaaccgtccatcatccacggagctacgacgccggatgagccagactccaggtccagcatggactcccagctttccagatccaggtgtcctccactacttgatctaagtagaccctttttgcgacgcgttcgtttgggagtctgcgtttgtggaggggtgacgaatggggctgctagactcaacaagacgactgtcatggcggtccattcaatgttgtcttcctctttgcctcgaagccatttcatgacctcccaccatgcgaccgtgatgccatcgcccgctttctcagactcacgcaaggcaaacatgcagattttgagtattttcttcaccagttcattgcgaggctccattcgaatttggagtctgtggcgctttttatcagtgtctaccaggtcgactttcccgcgggagcacccatgatcaaacttgttgaagacgaggctgggatctgccatgactcggtggacgccactttctcttgggcgactctcgagtttgttggcagagatgccatccggttcatacagctgcagtggaataggaacctcaactttgacgggactaccccacagggtttgcaatgatagctcgcgttgtccactttctgtttcgcttagtgagagtattcgcgaaagatccccatcagagattctacaagcatccaaaacgtttgacacattttggatcctaaccgcacgcacgagtaatgaggtcttggactttttcttccggttcttgggggctggctgtcggtcggccctcagattcacaatagttaatttccgtgcctcctggtccacgatgtatacagctaggaaagttgtgttgcctttgtgggcgcttccaaactcggtggatgccaatgtagagatcttcaaccggcgagatgctggctctttttggaagctgcccgagaattgggacgagaaactttcaaccttggtcaatataagttcttccgggagtccggacgtcgattcacgtagggcaatgttatcaaacccggaagatagactgtcattgttaagctcttcgagtagcttgtccactggagtatccagaaagctgcctgcagtgctgtaaacagaccctgtgcctggaggtagagagcctcgaggattgaaaccaaagcttccacgcatgcttgctccgagagattgcctgaacccagcaccatgaggcatgttgctggactgactgccagtagccaggtccgaaaaagtgatacggtcctggctagttgcaaggtctgttcgggcgagcagtgagctgactcgcctcgatgttttgaggggaacaccgacatctccgaagtcttgggctactctcgaagccaagtcgtcttcggcatcatttctcccttcagataactgagtggaaggccagttgtcagttcgaggcccgaagctctctcggcctgctccagaacgagcggctggtgttgtcgcgccagtcgccatcccgaaatgtgagcttcgccttactgaccgggtacctcctgtttcccgtctggttttatctttcatcgagccgcctgattcatcatctttgtagtgcgcagtccagactgtataaatacctgtagttgtgttgatggtaacgactaggatcaaaggaccactatttggtctgttgatgcccgagagttcgtcttttggagagatatacacaatctcatccacagggtccagcacctctagtccagacggcctttttctggtgctagtgatgctgctctgaagccagcgggaagtttgcgacgtcacaactaagcccatctcggaatgaggattaatgagagagaaaactcggggtaggtcggtgcttgaggcggtatttggcacccaggaaggacctggagcagacgaggatttcgtcgatggacgcttgtttttgctgagagaaaatgactgagaggcaccgggatcaaatagcgaagacacgaaggaattaggcggcgcagtcggttgttgactgctactattttcattctggacctttctttggaaaataagaccccgaggcgtagcgaagacggagtcaacctcaaatgggaggggaattgtatgactattgcccgccacgaagaagatatgagcttgcgatttgagaactaccaccaacgctctagaaagagcctcgttagagtgctggggagctacaaccgccactcgtgcatctccatgtagatccaatgttgagaaggtttcagtccgcttttgtttctgcgtgccagtagttgcttcaggtcgacttggaggcgtgggtttggcgcgtttcgtgtcttcagcggcaaaacgagtgaatagagcatgtcgaatctcttctttctcggggtccattcgaaatactcgcttcaccatccctgcgcgggaccatacaacacagtgtttcgtccatactaactcatcgtccaccgggccagtcaatccgctttcgtccacgcatagcgtccagttgtaatggtcttctgaaggttcctgagggagaattccctctgcgactaagtaggagatggccgagggttcgtggacgcccaaagagcgaactgacgccatggtgggctggttaacagccgtagcgatcgtggtgcgccgtcacaaacagttctgcagtcaaactcgttgaaatcatttccatcgctcatataagtcatgcaagttcaattaacggtgcgctaagaacgcatgccaagtggttgaatggcgaagttggaagacgcgctggaacgcggattggatcaagttgtcttcgctttccccgaccaaaacaacttcctttttccatctacccaaccctccactctccctacctctaacatccttctctcaatctgcttttgcataggaacagacgttcagttatcagatcttactttgactacaagtcttcgactgtctatcatccctgcagtgcactgttgcgcctgtgctcgaagctacctgtagctcgacagcatcgccaactagcataatgccctcatttcccactacgcccttggtgcggcctagggaagatggcttgcagatcaggtatgagtgatgcgcttaggtcatgatacttgggttgacgctaatctcgttaatgcaaaatctttagctatccgctctcccatcgcattcacacagcaaaaggctacccacttcgagctccgaatggctcctcgatcatcatttacggttatgatactggattaaaaattgtctggagaggagggagacggtttgcagaaccaaagctgactcggcctcaagcgaagcccaagccagcaggaagtaatgcggattccgattcagtcatgattattgactccgatgacgaggaccctcaaccagtacaagaagagcctgtggttgaattcagtctagaggaaagcgaggttgaccctgctgctccgtacgaagagattctgcgacaaattgatattccccttggaagccaggtgctagaactggcggtgccccgtgttctccccgaggaagctcgctcgcctttagaccccttcccacctatactgagaaacacaattgttgtgtcggtagtttgttcagacctgtcaacaaaagttgtgactctaccacttgtgcctcctcaccctacgcagacggattcaaaaagctggcgtatccaaaccctttcgatcaatggggccaccactcatcaagatattccacgtggtgtatctatcacattcacctgtcatgaatttgaggatgagcaagaccagcgaaagtcgcggggccgatttggaaattttggtaaatgggatctgcttgtggccacgcattctgcagaggggtgcggcgtgctgttgctgcaccggattccgatccgcgaggaatcttctttgcgtctcgtggaagaggacattatctctcaacggcgcctcttgccggcacctgcacagacgattgccttcaacccatccacatggccatccgcccgccatgccaacctgcttgtcgcattctacagcggatgtgtgaagatttattcctgctttgttaaaaaggcctcgagatctttgcgacgggcttcgatgccagtagaagaatatgaaactatcgacacggaaggtcgctggttgatcagtttgtaccccggttttgagcaagggcccggcggacttccccggcggaagagaatcattgatgccgactgggtgctcggcggccgagcagttatggtgcttctcgaagacggcgaatggggcgtatgggatatcgaaggtgccggtcctggggctgtcaagggcccgctgcaacgtcagacgagtgtccaaggtgtgactggcggttccttgacagcatacgctgtctgcggtcgtattatgacaccactttccaacaccaactccgaaacagagcatcgaccccggttcgcgcctatgacaccatccacaaggcgtgtacgtgaagatggattgctgaagggatcgatgagcacagccagtccgtctcaccgtggccaaatctctgtcttgcagacaaatccatcctcggacgtattgcctgacgagtcgatcctgctccgtcacggccgccagagcgcggtcatcacgagcttactgtctctgtggcgcaacgctgtcaaaaccgccggcacttttgattcctcgaaccgatgccgcgtttctcctttccaggacgtgaatttgatgggccagaacttccaagcaattggacacatacctgcaccggcacgccgatcccggcaagcgctgcggcaagtctgggatgtactcgtggcagcagagcatcagattatgattctcgccccgaagttgacagaatccatcgaggaaagcctgcccgtagtgaaacaggaagaaacagaagagaccgaccagctgatgctccaacgaggcgaactggatgtggaaggaatgggccgcctactgaatggtatggccggcggaaacgcgtctatgcgtatgggcagccctgtaaagcggactcgcgtgttcgcctgatctcagtcatagtctactaatacccatactccaagtttcttgcttctgttatgctcacgttctactcattcataggatactattcgcgctgtaaggtggagcgcaaggcgagatccatgccttgaaattccttcctcggaagtgaataagctctgtatcggatgcgatatatcaatgaccattgcaaaaagtgctatgcacgagccctgacattgcaattgaatgttgcagtgcaacattccgttacaattctcgtatttggctttgggttcgcatcttcgtctctgttctactgcggatatcgatctgtctctcgacgaatcttacatcgatggccgcggggggcagaggaggggatggccaaagttggatgcgagtgaatatgggtatgatgggacatttcaattagaaagcgtagatgtgtacctgttacaactgaatattatcatggcttttttgtactatgcataagcatatatatcatgttagtttcctcaaccgaacaaaatataacaagatcatctatagagatcgatgttggttttccttcaacaatccacgatcaccaccccctcccttttgccacaaccatataccctcaaccgcccatgccgcagcactagcatgacgaccaacaccggatgcaagaggcaagttactaccctcggcatcttttgcattcttgctcttatctctaccctgggtctgaccagcagcgccatcggcctcggcaagcataccagcaacaatgccttccttttcaataacgaaccagagtccatcggacagctgcccaccccgctctccaaactctgctcgaccgagacggaataagatccggccaatgacctgccacgcgatgcatcgttgcgcggggaacgtcgagcgtgccagaattgccagctcggggatcgtgtagcccgcggcatgcggatcctcgccgtgatggtgcaggcccatggttgtcgggagggagagggatgtttcgggggcaaggatggttcctcttagtgagaagcggattgccgagggcgccattgagatggcgttgctggctgggtggtaggctgacgtggaatctgggtcttcttcgtcggcagagagaggctgcatccaggagagcgttgatggatcctgtgctatctcggggaagtagtgtgactggagatctgtcaggaaagacggtgaagatgggtctaggactggcatcggcgcttttggctgggggaagtggaaggtttcaagagtagcggggtcaagggaaggccgttcagaggccgggcggaggtcttgtgggaggtttggtggagcgagatcttcattacgggggtgcggcttaggtgatggtttgggtagagaatgttgtgcgcttggagcagaaacaggtgcagacgaaggagtgtcgaaggagactgatttttttggtttaggtttttcgtcggccacaggtgccggcggttcaaatccagtcttttcatcttcttcaatatttgctctgcggaggaatcgtgcaagaagtcctgggtccatctgttccatcagctcctctcgctcctgttgaatctgcgcgtctgacattgccgccagctgacggcggttctcctcatcgatggatttcttgtcatcttggacggtcggttgagtaggtacaggagtcggaggagtggactggtttgctcgtcgctgcttgaaggaagagggcttgcgcgggcgaggggcagggaatccagtcgatgacgacaaggtcggcaatttaggcgcggggggaatggcggtggggggagcccgttcttggatctccccgatcagagagaagggagagggaatttctggagcaccagattcaccatccaggtcgagaaggaagcgttcacctcggaaagccatgatgcgtaaatactggtgaagaggagaaaaaaaaggttatgtcagcgcggggagatccaagatgcggctcccaaagctaaaatggggctgcagaagaggctaaccggaatgggctagtggaagatggcggatgtgctagtcccaattggattcctcacattggtccgtggcatctacaatgttgtatacggcctgcgttgatttttctatgctatgaaagaccgatggaagactggttaggatcattcatctcgatggaaatagaaagaaggatgttggaggggtttttcctcagctaaacggttcttatgcacgtcgacgtcgatattgtcgtacctatcatgaacttccacagggaatacacaggcaggatcaatattacatagactctattgtctataagatggaagaaatagtcagtcgaaaccagatataatcccaaaatatagcgaacatctgatttgaatcacatgaggccattcggtaaatgaggccattccggtatcaggtactgcgcacaatttacggttctaagctcaacgatccgcaagggaataatggatatggtctccaatgctccgtgacttcaggaaacaagaattctacacaagatagagggtaagtatagcgccatgctccctctctatataccgttctatagcaatttccccatatctccgacgtactatagagctggacatatcaaattgctagtactttgccaaatgtaatgtgctgtttgatccataacctgcttgctctcgtcccctttcttccctttttccctctttttttcccgtcgtcttctccctttctatttctgctttcgctctctttttcctctcgacattttccccttccccccttccgctcctctcgcttttttttttctgcttttcccgcgcttcctggctgttttctctctgcctcaccatcttatctttctggtgttcctcttcccccccaaatctctgtttgccgacctgataccgacacgtttcaccactttgcgtcaactcaacgccttcatcccgattttgactaattccatcactttgtcaattttcggtctgttaattggcattggcattgtgctaaattatgtcggaccctgctaagatggggatacaaaaagaagaagggcccgttgacgatgtcaaatccggagcaggcgcccgacgtgcctccggtaccgccaggcggtcgcgtcgtaagaaggacgacgaccccgacaaggacaaggacaagaccaaaaaggacaaggaaccgaaggaaacaaaagagaaaccggtccgagctcctcgccggccacgggagaaatccaacaccactgcttcccggaaaaagcccaagctggaacccgcggaagaaagggctgctccagacgctcgcagccctccacatacccctgcaacgcctcaacctgcacagcccgctcagccaactcagccaactcagccaactcagccaactcagccaactcagccaactcagccaactcaaccaacgcaacctacgcaacctcaaatagctccaccgcctcaacctcctcaacctcctcaatctgctccgtcttcatactcaaatacaccatcccatacagccccaggagcttcgtatcagctgtcgcaaccctcccgcccacaatcgcaacctccagtaccgcaaccgccacctcaacgaaccagcgggcaaaacttcgaccccattcgctctgcgttcgacaatccatcgccagcgccatcatacagtccttctactcgcgcaatctctcctcgcaatgcttatcgtgccagtgcatcgccggcgatctcaagcattatcgacccaccagcccagaactctcaaccaatttacaacacccttcaacgctcctcttctggccatgtatccggcctctcttcgccagcactgtctgcgatggtttccacctctccacatccgtccttagcaccccccgtttcctccgctgcccgtggagccatgcacatcccgcaggccatgtcgcagtctaccccctacaccaccccatacccacctaccgagcagcggccaacgccatcacaacctcctaaacccgaaccgtctccgccggtgcaacctcagcctcccgcgcaacccgaacccgctgtgcagtcgactccgcccagacaacaaccaaccgattcaatggaaatcgatcccacagagcagcttgaacctagcgctaaaaaggaaaagagtacagctactgcaccgacatcaaaggcctcatctcccaagccagcgcgatctgccaaagatgctcctcaactgccccaaggatctggcatgatcacaaacgcgctgttcggcggaggagaggaacctgcaaagtcgcccgactcacgaagcgcacccagcatcatcgttcatgttccgctacaaaagggcaaccagattgtgaactttgcacggcttgcagaagagcaatatggcttcgctgccttgcaccctcgtctggccgctcacaaagcccgcatggctcgagtggcagctgctgcggccgcgttagaacgaaatgataagactgccaaagggatatctgccggcgagagtgccgatgaggatctgagcctcgatgcagaacgcgatagtgatatggatggcgatgttcccatgggtggcactggcacaggaaccaacggtgcgccctcggagactagcgatggaaagaagaagcgacgcaagaaggtcgaggaatatgaccgtgatgatccatttgtggatgacaccgaaatggtgtggcaggagcaggctgctgctagcaaggacgggttctttgtctacagtgggccactagtcccggagggagaaaaggtccaagtggaacggtatgtctactcattgtccccttactgcacatttactaattatctgcagcgccgatggtacaatcaaacgtggccgtggccgtgggcgaggaacaggtcggactcggaccgtgacctcgcacccacacgttcctattgcagctgccgtgcccgtctcccaagatactggcctgccattacgtggacctggctctcgaggtggcacctcacgccgaccgcggggcaataagagagccgatggtggcagcgaccgcgctgctaccgcagccttcgctgcatccgcttcccacgaaagccgtggtggccgtggtggcggcactgggagctctggtcgtggtggaactaacagcactcgaggtggaaagtcatccatatcaatcccgatgccagaccttgctcctgcgccgtcgggtgttgcccatggaccccctgctcccagttcgctatctagcccagagctcatgatgaaatagagaacatgttgactgatttttcgtggcgtttgtttggtggtcggagcttgatgactttgtttagttttatttgcgctatcattttgctcatgggtttgatttgcccacctattacattgttttttgttgtcggactcgagaaacgttgcttcgtgaacacatggactctctacgtacacctcggttatgttattatggctgaatatcttaattttcagccaagatgcttccaatggaacacgcttagactaagtcatccttaggcgcctcggatattgagtttgttttaccattgtcgattctttgtatgaaacaaaggtggtgtttcatgttttatggtatgaaacaatatgcaaagtctaaagtactctatgaaacaaacctagaccggtgtctatatagatatgcttccaaaagaaccgtattactagtagcaatattttatatcaaatggaattaccgacctgttctatatttatccatcctctaaagacatgagtgcaaaatctagaataagtggtttattggaaatatttatcgggcgcatatccatagaaagagtatgaaattgcacttatgtacaccgtgtaatgcaggaagacatcccagcagccaaagatagaatcggaaatgaacaaaatagggttcgttgccagatgtttctaagcagagtcattgaatgagaagtaagaagaagaaaatagaaaaagagagagaagagagacagagatacccatagatcaatggaagaaaaaagaaagtcctgttagggcagcttgactcgggctctctttttttttgttctatcaagagcgccgtgataacacaccagacagaacaacacagccgacaaggaaataacagatatccacgatcatcaaagccgaaatcgtatcacatcgacttttcaggtgtatgtgcacgttacctggacatagacatgacaatggaaggaaatagaaccaagacatccaaatacattaactagtcatcaccaaattaccgggccgtacttcctggttgggtgcgccagtttccgcctgatggaacaggcaatgggggaggcgggccgttcggaggcgcagtgcgaataggcattgccgtggagtgcaggttcgtacggggattggagttgttggagctggcggagcgagggctcatgaatgggcgagatggggcatcgatggcagagacaggctcgttgagctgctgacgcatcgcgcgacgaccgtatcggctgtcctcgtcgtttgcttccagcgagaggtgctccagagaggggggtggtggagaccgtgtggttcgggacgaagacgatgagtaatattgaggctgaggctgggactggggatagtgacggtagctggatgggaactcgttggcgatctttagagggatttcgcctgatgctgggtttgacgggaatggtgactgctgtggggttcgtgtttgcttgttgacgagagggggtttcccgatagtgcctgatatgggagctgcggcgggagacgattttggggttggcttcgaggcctctctagagagttgggttgatattggtggtcccaaataggacttgcgcttttcttggtccatcatgctcattgcccatccttcgaggttgactggtgtgcgcttcgcggcctgcaagaaggcatctttgtcctgaaaggagttagtacatgtgaaaacaagctacaggtcaaaaagagagatgaacatacataaagctctcgtggggttgggcgctcttcggatttcttcaagagacacttcccaacaaagtcatgtaggataggcgggaaggcatcgctcttgggcagcttgggcgctgtctcgtgcacgatttgctggagtagatccaaaattcccatgggccctgtactggcacggtttccggcaccagagtcggagtgatcgaaggggaactttccaacagccagctccatgaccgtcaagcccacgctccacacgtcggaacggaccgtataggcgcctccctgaattcgttcgggagccatatatgtggaagtgccaacgaatgtatcggcaatcgagttaactgtctcagtagcaacaccaaagtcacagagcttgatgttgccgcgggaattgagtaagatattggacggcttgatatcacgatgcatgatgcggtgggtttcgtataagtagacaaggccagccaagacggactcggtgatctttcccagcacatcgactcgaacagggccgaaatctttagaaacgcggtcgagagatctgatggcccgtcagctatatcctctttgtttctcatatcggtccacctacccgaggtccatatattccatgcatagcacaatatctctcgcttcgttttggaatgcaccatagaaagtgacaatattgggacaattgcagtcatgtccgactcgaagttctcgtagaatctgtttccgcacattctctttggcttccacacggataatctgcgggcataaggaagattagagctgaccaacaagcaagaacacaccatagacaatacacacctttcgagccatcactaccttggtagatgcgtgcatcaccttggagacagtacctccattcccggcgccgagttccttcaatgtgaccaggtcttcactgcgaagatcgaggcgaaactccagaccgatttcgagcgtatctgtgttgctaagttcgctattaccagcagacccagtctgtccatcgccatcggcaggtttaggggctgcattgagagcaagacctttgacattctttcgtttcaacgtccgagccttgaactggtccgtcatggcgcctggaggggttggagttgcacaaggggaaagttgtgaaagaaataaaacgaacagcccagcgcctgagtgatatcaagtccgggttacccaagccgatgggatcagagtggtcaaaacgaacccccgagctagcagcggggaagtcgatatcaccttgcgatgttcttggcgacgctgattggacctttcgggcgcgtcgcttcgaccaactatgaccaaaatgtgccggtcggcggcaaacagatattgggcttttcttacaggtatgaagggagaaactgggagatgatcttcaagaactatgaaagccactgcaatcaatgaaacaacaaatgtttcgggggttccaccggccttttgggctagcttgggtacttgtgactttacacaacggggtttacggctaaaatgaagtggataacactgttcaaactcgggcacgttcaatagtctcggccctacatcaatagtgtaaagcgatatgcataatgaggatccgaccagggcatggttgaatgtacacaaagacatcagcacgtgacacgaatggcttaagccacaatgaggctacctcaataggactagcgtctagccacaccagcactatccaatcaccgctacccgcgtcctctcctcgccgatggccgtgattcttcctcttgacaactattgcttcaattccacctctttgtctcacttttgaccgagctaacgagctgggcactacctggtgtcgcatctgcgccattctatcttgaatctttcatccgaaatcgcattcttttcggtccctagcaatagggatctccacttcaagatgagccttcgcgacctaatcgagggtgaggcagttatggatgacgacgatgaggaagttgccgacgactatgatgctgagggccgccagggcgcaggtgccgccaatcactacaatgactcgagcgaggaggaagacgaagaagaagatgacgaggaggctgctcgcgccgtcagttttcgcctttcaccgggttgtatctctttgctgacgaactattaggtccgtgaaggtttcattgttgatgaagacgaagaagacgagcgtgccgcccgcaaacaccggaaacgtccacgcgctgctcgcgaagaagagcaccttgatgaagaagatctggaactcattggacatggcccaagtcagcatcgtggaccagctactgatgtatgtaagccgcagctcattacttgacaagattctgatgctctgattttagtcaaagtttaagcgcctgaagcgaggcaaagatcgcgaaagctaccaacagtctcacggcgttgacgatattttcaactcggacgaagaggaggaagcgcaacaatatgctagaccaggccagcgtcgtggtctgcgcgatgaaatggacgactttattgaagaagataccttctctgacgatgaggctcagcgtgaacgggatgaccttggggttgcgcctgcctccagagtcaacaagaccggcttgattccgactgacacctcgggcttggatgaaaatgcacttgaggatatgcgcgctgcatttggtgatggcacagagtacgatttcgcactgcaaatggaagaccaagaggacgccgacaaacaaaccgaagaacgccacctagatttgaaggacgtctttgaaccatccgagctggctgaaagaatgttgacggaggacgataacgaaattcgtctcctcgatgaacccgaacgccatcaggttgctcgcaagccctataaacatgtgacattgaccgaggatcaattccgggaggaggcagtctggatttcgaacttgatgctactaaagaagcgcatggatcccgaactgcgcgaaccattccagcgctccgttgctaagatgttagaattcctgatcacggacgattgggaggtacccttcatttttcagcatcgcaaagactacatgattcatgctgtcaaagatatggccaatggcgccgatcccgacgacgagtccgccaaatacagcatccgggccgagaaactcctcaatatgacagatttatgggatatcttcgaccatgatctcaaattccgggctttgatcgacaagcgtggtacaattaaaaagacatacgacaatctgcaaagcctcttcaatgtgaatgattccaacgtcgaggatcaacttattgcggccacgagcatggaggagcttcaagatgtgcaggactatatccatttccagtactcctcacagctacgtgatctcaaccaggtcaatggcgatgctactggagaaacacaacgccgaaaagccaccggaagatctttctttgagcgtgttcggaacggcaaggcctatggcttcgtgcgtgcttttggtatcactgcagatgcgtttgctcagaacgcctccaaggaaggtcgccggcaatacaccgaagatcccaccgagcagcctgaagatttggcagatcagtttgtcgacaatgacttttctaacagttcgcatgtcctcaaagctgctaagtcaatgttcgccgaagagcttgctgtcagccctaaaatgcgcaaggtgatccgtcaggcatactacatgaatggagtcgtggattgcttccgcacagagaaaggacttcgccggatcgatgagcagcatccgtatgctgaattcaaatacctgcggaaccagcagctaagcgatattgcccgtcgcccggagatgttcttgcgcatgctcaaggccgaggaagaaggactcgttgatgtccgggtgaggtttgagaactttgaccagttccgcaaacgtctctacgccgatatcgagtcagacaactacagtgagcttgctgatgcttggaaccgtgttcgccgtgaggtgctggatttggctttgggcaaactggagaagttgatcaatcgcagtgtgaaggaaaatattcgacaggaatgtgagaaccatgtggccaaggagtgccgcgaagcgttctcacaacgtctcgaccaggccccttacaaacccaagggcatggttctgggcacagtgccccgtgttctcactctctccaccggatctggtcagctgggccgggaccccattcactgggcttacacagaagaagatggccgtgtcttggagaatggcaaattctttgatctttcggtaggagatgagagccgtgacattgcagatggtgagaacctagccgcatttttggatctgatggatcgtcgtcgaccagatgtcattggtgtttcaggcatgacgccagagacgcgccgcctgtacaagcttctatccgaaatagtcgaacaaaaagacatacgtggtgcatcctacacaaatgagcacgatgaggagatcagcgacccattagaggtggtcattgtcaatgatgaggttgcccggttgtaccacaacagccctcgcgccagaagcgacaatccaggctttggacctctaacccattactgtgtggctctaggccggtacttgcagagcccgctcaaggaatatgcatccttaggccgtgacgttgtctccatccagttcaaaccaggccagcaactagtctcccaggacctgcttctcaagcagctggaaaccgcactggtggacatggtcaacttagtcggcgttgacctcaacgaggcagtggcggacacggcgacagccaatctcttgccgtatgtctgcggtcttggtccccgaaaggcggctcacttgctcaagattgtcaatatgaacggcggagtcgttaacaaccgggtagaattgcttggtgtcaacgcaacatacccggctatgggtgtcaaggtttggaacaactgtgctagtttcgtctatattgacttcgagaatgctgatcccgatgctgatccgctggataacacccgtgtgcatcccgaagactacgatattgcgcgcaagatggccgccgacgcacttgagctggacgaggaagatatcaaggccgaaactgacgagaacggcactggtgccatcatgcggaagctgttccgggaagaggcacaggaccgtgtcaacgatcttattttggaggagtacgcagagcagcttgagaaaaacctcaaccagcgcaagcgtgccacactcgagacgatccgagccgagttacaacaaccctacgaggaattgcgcaagcactatgtcttcctcagcaccgatgatattttcacaatgctcactggcgagacgcccgactctttaacacctggtatggtggtgcccattgctatcaagcgggtatttgaggatcacattgaggccaaattggattgcggagttgatgtactcgtggccgagaccgaactcggcgttccctacgaaatccctgtacgcaatgtataccaagtccaccaaactgtcccggccaagattctgttcttgaaccgcaagggtttctcttgcaacgtctctctacgtgaggatcaggtcagccatccatctcgtcggaaccaggatcatggcttcggcgattgggacgaacagcaagagaaagccgacaaggagtcgctgcaagaaaagacgcagcgtggcggccaagccatgcgtgtcatcaagcacccgcttttccggccgttcaactctacccaggccgaggagttcctaggttctcaaagcccaggcgacgttgttattcgcccgtcctcccgaggtcccgatcacttagctgtcacctggaaggtggcgcaaggtgtgtaccagcacatcgatgttctcgagctggacaaagagaacgagttctctgtcggccgtgtcctcaaggtcggtggtcggtatacttatagtgacctggacgacctgatcgtcaatcacgtcaaagcgatggccaagaaggtgggcgagatggtattccacgagaaattccaagaaggcagcaaggccgagacaggtatgtttttgataatttatcccatctaactagcatccgactaacatctaatagatcaatggctcgatacttataccaaggccaaccctcgccgctcggcatatgcattctgcatcaaccccaaataccccggttacttttatctttgcttcaaggcaggcgagcatgcacgacttcaaaactggccggtcaaggtgattccccagggctacgaactgcagaagaacccctacccggacatgaacgctctatgcaacggctttaagctgatgtttagcaacatgagcaagggcaaccggagatgagtgtttctcgtctgtacagtgtactatctattcccaaaaaaatccccaaatcccgaaaagatgggatggaatttcctacttcttttaatttgatacacctttggcatcgggcatgtaaacaatatcaatgaatttcaagcgattcgtggacctcgagactgtatagaccggattacgtaggctgtatacaccgtgtaccatttgaactcatcctcggtttcaacattgtttcccactttcgcccctcatatttcctcgcatttcctcatatttctttgtttaattgaagcttcagccccgaatgcttcctgtgatgtcaattgtatagtgtggcttatcccccgcatcgccacgttcagccgcaccggaccgcgacggacacattgcggttcttgcaacccctcactgcgcaattatggcggccatggaagagctggagattcacagcaaggtagggctggaacagtgacagtcaaagactcaagctcaactaatatctttagtcgtactttgtacgttggattaatgtcagcgcgaactacaccatctcctggagtatccaaccgcacaagaagtccgtcaactttggcatcttcaaacaccccggcaaatcgtctgttctgagctcccatatccctgcctccgattcccaaagcaccgattcaaccgagaacctgcccgcaacggcgacgactgccggcgcgcgtcaacaaccatctgctgttatcgagaagctgacggggattgggctcaaaccaatcaaatggacgggcaagtgtgaggcagacaagattacccaggggacctacgatgtaccgttcagcgaagggggcaactatgccctcgttttcgataacaccttctccaaacaaatctccaagaccttgacactcgtcctcctcacctatccgaccggccttcaaccacctagctccgtatctcagccaggggcgtcgaccgagtcgctgccgcagcccaagacccgtcgacgaggcaacagtcgagccacgctcaactccctgcaagttgacgcatcgaaccaaaatgtctacactggactgctgcagaagcggcgacgaaagcgtcaccagggttgggcacgccggttcttttcgctggactttacctcgtgcacgttgtcatactatcatgatcgcaactctgccgcactgcgaggcgcgatcccactctcgctagcggccgttgcgaccaacgaaaagtcccgtgagatatctattgattccggtaccgagatatggcatctgcgtgccaataacgatcatgaatttggtgaatggaagagtgccctcgagaaagcttcctccaaggaagcttctaaggacaagaacaatggcagtctagctgcccctccggagctgcggcttttcgccccatcgcagccctcaccgatggaggagagtgaatgggctcgcgttgagagccttgtcagttatatttccggatcgcgagatgcgatccgccggctagccaaggatacagatcccaagtatcttacctcgcccctctcaactcctatcgaccggcctcgttcgcgtggccggtcccctagtccccagcgcagtactcatgaggctacccccagtgagatggaggccaggcgcccgttctggaagcgcaagacaagtggacaattgaatgccaacagcaagcgaccatcggccatgtccacggactccagttcctctcagcttgtggtgcctgctaccgagggcaagggaaagcctgccagtatcaccagtcccatagacagcatggatgagattcatgaccatttgatgactgtgctgcgcgatcttgacaatgcggtcactgagttctccacgctgattaccgagagcaaagagcggcggcacccgccccagccatctatggttcctcnnnnnnnnnnnnnnnnnnnnnnnnnnnnnnnnnnnnnnnnnnnnnnnnnnnnnnnnnnnnnnnnnnnnnnnnnnnnnnnnnnnnnnnnnnnnnnnnnnnnnnnnnnnnnnnnnnnnnnnnnnnnnnnnnnnnnnnnnnnnnnnnnnnnnnnnnnnnnnnnnnnnnnnnnnnnnnnnnnnnnnnnnnnnnnnnnnnnnnnnnnnnnnnnnnnnnnnnnnnnnnnnngacgcccgcctcagccatctatggttcctcgccggagtatggagtctgacatgtcgcaagaattctttgatgcgacagctggaggtggtgacaggtctcccctcctgactatccaggacagcgacgacgaagggcctgaagaggaccggcctgcctctgctgccgaggcagtccaggatgatgccccctctgatagtgacggtgaatgccacgcggcagcaactcgccaggaaagcagcaccgcatcgggcatgttcccagtcaaacccaaatcgttggttccgttgcccctggagcctataaaacgccgggcgaacattctcgccccaacagtcctacctccaagcttgattggcttcctgcgcaagaacgtcggaaaggacctgtccacaatatcgatgccagtgtccgcaaacgagcccatatctcttctgcaacgcgccgccgaggtcatggagtactcaaatctgcttgaccaggccaccaaatccacagaccccattgagcgtctgatgtacataaccgccttcgcaatatcctccctttccagcagccgcgtccgcgagcgttccatccgaaaaccattcaacccaatgctaggcgagacctacgagctagtccgtgaagatcaaggcttccgtttcatctcagaaaaagtctcacatcggcccgtccaactagcctaccaagccgatagcaaagaatggagcatttcgcagtccccgatgcctagccagaaattctggggcaaatccgccgagatcacaaccgaaggccgcgttcgcattatcttacacagcaccggcgaccgctatagctggacgccggcaacatccttcctacgcaacatcatcgcaggcgagaaatacgtcgagcccgtcggcgagctagccgtcacatgcgaatccaccggccaccgctccatctcaacattcaaagctggcggcatgttctctggccgcagcgaggaagtctccacccgcgccgtcgacgcaaacaacaaacccgtatccctcggcttatctggctcctggccctccacgctaactctgactcgtgacggtaacccgaccgatgacattatctggaccgccggctcgctcgtcccctctgcgccaaaacactacggtctcacctcctttgcagctgcgctgaatgaaattacctcgattgaagataagcatttgcccgtcacggactcccgtctgcgtcctgatcagcgcgcgctggagaacggtgacctcgaccatgccgaggagcttaaggtacagcttgaggagggacagcgtgcgcgcaggcgcgatatggaggatgctggggagagttgggttccgcgctggtttacgcggattactgatgacactgacggggaggttgcttggcggctcaagagtgggaaagatgggtattgggaggagagggctaaggggagctggtctaatgttgtgcctgtgttcgagaatcaagagggttagactagatagttgttgatgttggtttgttctgttggttacattctattggacatgcaagaccaagaatataaaggagagatgaggcttcgcggtgttttgggcaggaccttcttcactctatatcacgataaatacggacttttctttctctggatgtatcattctcttgaacggcttactgagcgtgaggatacttgatgcgcagtgtcatttcgttgggtacaaagttaagagtatcgaatcacgaacaagaagtcaagtaaatatgaacagaaaacagaaagcaaaacatcaatgaagagaacattgaagctgagaataaatctcatgaaccgaggcttgtatgcgaaactgaaatcctccatgtgaaaaaccgtaagctgtcgtattcatcgataattgaaaaaccgaaaaacataactcctttttattcatggttccattgttagaccatcaccgatgcgagtatgcaaggtactcatttactcgtcgtcatcggattggggagcagtccagcgacgcgagttgcgcatcttggctgccttgcgtgcactttggcgatccaccgacccataattctgatttgccatgcgcatcatgacgggaaggctgttgagaacggaacggttaccctggaaatagtgttcggaaaagccgccctgcaggatgcggcgcagagcagtgagtcgtacccacttccaccagcggtcgatagtcatgactccatggcggccgatcttgacagtgagagtgctgccgtaatgacggttggtgttctggtcgatggcggtgttgtaacgaggaccgcggcctgggttctcgacagtggtgaggatcgaggcgaagttgctgtggagggacttcttgtcgcgcttgcttatctgcttgccgtggacggtggccaggttctgaagttggctctccagctcgggagtgttgtggtaagcgttgtatcttttcacgagcttgggaccggatgtggaatcgtgctcatgctcgtcgctgtcatcgtttgaatcagcgctctcctcgtcttcgtcatcctcttggggactgtagctcttctcatagagtagggcaatgttttcgcctgctgcaatttgcacgttggaatcggagctgtcgagctgatccatgaagatctggactgcttcctcgctttcttcttcaaaatcgtcgacttcggtggcgaggaacccccactgctggagcgcggcagtaacaatggtggggtcgtctgtggcatcgacggattggccatccgaggcgatgatgtccaggaggaaactcatctgttcaagaatgccatcttcaccggcacctccgaagatagtacacgccccaaggcagtgaatagctgctgccttgacaagaggggaagcagagtcacgaacggtacgggtgagcaaggactcggtgttttcgtaaacggtggtgtcgaaagctgagatgacaagcaactcgatagcgcgcaagccaagggttgcttcgcgcacactaatctcggtgcggacgcttcgctcaaatgcggccagtagttctggaacaacgccgtggatttcttctactgtgtagtggtatttggtcaggcggcagaatacttgcagggcctcctcgcggccttggacactgctgcgcttgcgatcaaggatttcttgaatacgctcgccgagttcgtgttcccaatcgggattatcttgttcggggttctcatcgtcgagagatccgatgctatcccgaattggttagtgccttgattgtaaaacttgccgacatcattggtgacatcatcccgccacgagagtgggaccatatgaagatacaaaaaaaaaaaaacagacgaaaagcgcaagaggaatactatcagcttacctcatagatgtttcgtcagagaggaatcccgagtcttcttcatctgaaggagctctgctggcattacgagagccctggcgcgaggtctgctttgaactggcgggggagttggtgcgggatgcttcacgggatgctgcctttcgtgagacagtcttgccgctctcgaagatctggcgacgtagatcgggcattttgataggatgataggggaaatcctcgaaatgggtacagttgggaacccagtgtgggaataagtagtaaaaaggatcaagccaagagacggttctctttttaacctatgggtactggacaatagtcgagaattagaagagaaagaagtaagtaattgtgcatgttctcaaagaattcgagtatactgaaagaagaggaagaggagagaagaagagaaaagaacaataataacaataggacgacctcgggactcgtgactgcgtatgtaagcctatcagatggcttcttttacattttgtctggcattccaccaatcagatatagattgggacaatattcctcttcctttgaaactattcatcgtcattgttcaatgtgctactagtccacttacggcagagtttttcatttccaaggttagggaaccatgacagcattggtatcagtatggaggattggacatggactttgacattacgccagctgagtattccctttgatctttctttgaggggtatcattatcatacatccgagaagttggagcctgttacagctgctgccgcaccaactcgaggatctgttgggccttggcgccctcgagatactcgcgaccttcctgtcgccattcatcttcctcgtcttcctcgtccccaatctccaagtccacctgcagactagcattgtaggcacctttgaccgtatcttcgtccacacgcactccgttttgcaccagaactcgaatacactgtgtcaaccgtgcaatctcccgacgggtctgtggcgggatatcgtcattctggctagagtagatggagctcgacaccatttcttccatgcgcgtaatagagacattttcagtagtcgatgatgcggcatcttcatcggaattcttggagataaatatgtacccattcaccccaaggacaatgttcacgttaccaccaccattggcagtggattccgtccacacctgtcgacgagaccgcaccacaccaccagtaccagaacctccaggagcagccaaagcgctgcctgaagccgaattcccaaccccaacgccgcccttgacgctagagctagacgctgcgctgcctccggttcctgtaacggcgaggaaaacaccgttgcgcagcttcccgtacttcaaagaccgtgtgtgtagtgacgccgacccatcctggtgcacgctctgcacttcggcaactacaagatcgccttcgctgaaaaatgttcggatctggagctcgtcggcgcttgttcgtcgacgcagaataccgccgggcagattgattgcggaaagagggagctgggcaagtagcggtgccgcgacgtcgaccttccaccgtcgtgattgcacttcgacaatgcggccaacgacgagatctccaatttcgggggtatagcgggcgcgcagagggtgaacagatagtagcttatttgtcttttgaactgtgccggcaacagtggcaattatagaggtcgagagcgggttcatataggtaccatgacctctgtagattgttagtgctgaaaaaaagaaaatgacgatatgagctccgcattttttttttttttgcgcagcattcaagatcagaccaacctcatccattgtggatcatctgtgaccacttctcctggtgtgacaatccctgtgccaatattcgaatttccttgtaaacggggtcgcttgtgaggccgagagataccagtcatttcgacatcctcctcggagtccatggacatggagtcatctgagtcagcttcgtagggacgggagtcctctaccacaggtgggagaatagtaattgccattgcacagtatgttgtctgtgatcgattgcggttgacttcaaaatgggagtggaggcattcagataggtagagaagaaaatccaggtcacgtgatagccccacactatagccaccaccatttacaagagaaaatactccgtacattagttagattagagctatctcaataccgcatgaagactacatttcatgtcactatatttcaaattaccaatgctaatgttccatcatatcatttaaagccagtgaatcaacccaacgccaatattaatacataaaatgaattccgtttatgaaatcaactgctcaagtctttttggccactttgcttgggttggaagtgggctcttccttcttcttttttgaccggctgctaccacccttgggtctataaccggtgtcctcctcacgcttgcgcttgttcttgggagtaggctgggcctctgtgccgtcctcatcatacatatcctcatctttgcgctgagctggagcccgcttggaagatcgattggaagggcgtgatgcagacttttcagaagcaacctcattatcctggagagtctgaggttggttacgacggagccaattgtataccgatgcgggattccgcatggaaagatcacgctcacgttccgcaaacgtgggacgttctggaatgcgtgcaagctgcgtggcagccgcctcatcacctagcttggcgtccaaggcaaggtagtactcagtctcacgctcgggcgtaaagtatccaagttggcgttcacaatcattgtcgggcttcttttgaacagcgtctggagtgatgtgatgagcccgtgacagggagctatactgctgggctggtgcaaacgctttatttcgtttgatgttgtcctcaatgatacgataagcacgcgtgtcaatgctaccagcagccagtccagctttggcctccttccatgcttgttttgccagtgtcgcatcgttgatcaaaggtacaatttcctgctcgggggttggtagcaagggaaggtcggtcggcatgctcagatcgaatcgcacatcaggagaaacatgtaggctttcgttgaactcgaggagaacctctagcaattgactagcacggaggaattagcaatagttcatacaggagagaatttgtaagtcccatactcgttttgctcttggatgcgcttggacaggtcctctatgcgcaattcctcccggatcaaactctcattctctcgggttcctagctcgaacctgactttcagcttggcatatttcttcctggagaaaagagggtcagcattatccgatgggctgattgtgaggactcgtacttgaaagaccggactgattgcttaggaggcggtgcagtggctgcatttggcaaagttgcagtgaagcggttatcgttcggttctgccatggtgttatggggaagagaagtttagaagagccgggatgaaggggatgtggtcaccctgcgcgttcacgccaagaagcggatccggctgcgtgagaggcggggcctggccgccggcaaaaaaaaaaaaaaaannnnnnnnnnnnnnnnnnnnnnnnnnnnnnnnnnnnnnnnnnnnnnnnnnnnnnnnnnnnnnnnnnnnnnnnnnnnnnnnnnnnnnnnnnnnnnnnnnnnnnnnnnnnnnnnnnnnnnnnnnnnnnnnnnnnnnnnnnnnnnnnnnaaaaaaaaaaaagtaaaattattgttcggtttcctgtgaccagaaacaatctcaggcttctgatagattgactaatattatagtagtcatcacaccattttacacctttcacattatgtcggaactcaccgaagtcagtcaaaagaagcgcaagctgcaggacggtcctgagcttgaaatcgatgtctctgcacccgagccagtctcaaaaaaggcgctgcgcaaagcgaaaaagaacaaaggaggcgatgcgggtgatgaggagaaacccaagtccagcaaatctagcaaacccgagtctaaagaagctgaatcagacgggaagcggtccaaatatggtatctggattggaaacctatcgttttcagtgaccagtgaagagctgcgcatgttcttcaccgtcaacgctgatatctccgagtcaaatatcacccgaattcatctgcctaagggccccgaaagatttgggaggtcgcagaacaagggctttgcttatgttgacttcaccgacaagaagtctttgcaagaagcaattggcctaagcgaacagctcatgaccggccgccgcgtgcttatcaaagatgcaaacaattatgaaggtcgcccagacaaatccgaagcccaggcgaatgccgcgggtgcagccaagtctggccaccctccctccaagcgaatctttgtcggcaatctcagcttcgatgtgaccaaggaaaacctcgaggaaaacttcgccaaatgtgggactgttaacaacgtgcatatggcgactttccaagacacaggaaaatgcaaaggttatgcgtgggtggagtttgaagaactcgctgccgcagaagccgcggtgaggggattcatgttgatcaagcaggatgacgaggaagaggattcctctgacagcgattctgactcggcctctgagaagaagaagtcgaagaagctaaaaccccgcgtgcaacgggtttgggtgaaccagctcatgggtcgccgtatgcgaatggagtttgccgaagatgcgggtacacgatacaagaagcgcttcggaaaggatgccgagaagaaggatgaacctgctatcaccgaagtcgatggcgaatcacgagaaagaccccgacacaagaagagacgtgaatccatcgatgagtctcgctactcgaaggaaaccgtccagaagctcagtggtgccattgtcgagggccaaggtcagaaaatcacgtttgactaagttattcatctgcttcgtggagtccaattatctgcggtctttctacaggaccattcaatcatctcatacacaaatgtcagtggaattctgatacctatcaatgatctgcccgcaatcgaggtggcattgggatcaaactccgaccgtggtctaccctgtgacttaagcgggatcctttggtcatagtttttgaatatttgtacgatctctccagatatccatggtcatcgagtccattcctcagtggcacagcttgcagtgaaatgcgcaagaaaatgtacgtatacttccggatatcacaacatccggcctgcatactagggcgcaacctcaaatttcccagaatacaagcaaagtttctcacataacaatattctatatcaaagccttctgtaactagttgtcaatatttagttcagacactaaccaaatcaagtaaacaattctaggcccaatcgtggcagaaacagcttcaccgcctggactaggcccgatcaggcctgacgtctctcgcgatgtcatgcccttcctctgaactcgaatctctctggacttctcatctctcttgggctgcatctcctttctcctttccccttgctctttctcttcttgctctttactttggttattcttcttgcacacggtttctttttgtttcttctagcctttcttagtactttggtcttgcttgatttcatttgctattccaccgatttatcgtccttcaacgtccgttgtctaccccggattccgtcctctaacctaatccggtcccggtaaccacccagtcaagcgtcaacggggaagacttaagccacccccaagtgattaatcccttgtgtctctaccatggctcctcttcgacgtcatatcggggccagccgcagaaagagacgggaggaagatggtgaagaagagagttcaatggctggtgacatgggagatgactcgttgagtgaaggctcgtgcgatagccaccaggaggacgaagatgcagacggagaagtcagtgaagagagcgaggacgaggtttcgttggataaggcgggcaaggtcaacggttgtggggtagacaaagctacacggaacagctctgcatcccccggaaaacgagtactcaagacaacagtttcggatacagaggcaatgctcaacggcctgaaggtctcagacggtgcgggcgacgctacggacgttcatttcgaagatctgaaggaacaaagggagcctcacgctggaagaacgccttccgcccctccaaccgaatcaagtcgaaacaatttagcttccagaaagcgccgcgagaatgacaagaatgtcaaggaacgagagcagaacccagccttcgtccccactcgcggcagctttttccttcatgacaagcgatccaccgacaacggtcaccgactcaagagcaagtctcgtccctacggcttgatcgtagatggtagctctcgcaggtatgttatattccattctatttccgactcctgtttcttactaacatgattcaggtcttctaagcccgatgccagtgggcagtgggcacacgatctccacgataccgtggctggcgaggatcgacccgcagcaaagcgcccaacaccatccgcgatgcctaatcctggcgcatccgtccccaccgccccgagatcttccccgcccaaccggtccttctctagcacaacgttggttgggaacgtacctgttgttgtttccttgcctggcatggccagcccaattcatttttcttccgtgcccaaaagactccacacccggctacctcagcatcgaccccctttgcgacgcgacaagccagtgcgaatctctcttcccagccagcctccccgatacatatttccctctgttgaacgttcgtttatcttcatcccccgcgcgttgcggccgaaccaagtctctcgtggtcgaggtcgtggtggcggctggtacggtggacgacgccctagctactatcccaactcatcttacacgccgagcattatcagccgtcgatcttcgtttggtatgccaccatctcaggatgggtggccctcacctgctgtgtctgtctactccagacctataatttccaacgactctaagcccgttgttcgtcttccccctccatctcgtccgcctgtcgggatcccaccatttgggcctgcgatggccatgtcccttcctcacccggcctatcgcgaaagccgccccgccccaatcccgatgcaccaacctcgtccccagaagaccgtttctgttgcggacattgaaagtccggcagctttcccgttcactttcaacccgcctcagccccagcatgagcagcctttccaccatcaagtccctctcccagctcatggcccacccagccagccttcggccactccactttcccagatcccggagcgggcgattcatgcaccgccctttcaaccttacaattaccaccagcctagcttctaccctccgagttatccttcgggcggcatgtactacccgccttcggggcccgattacacgggttacaatggacctattggccccggagcttctgtgccaaacttcccgggccagcaagtgatgccgtatttagctggggagcagcctcctccaccaggtactgttgctcatgagtctggtggcaccgtctacttttacgatgccaatcatatttatggaggtcccgcaccaccaggatctgggcctgggggggtggttggcatgggtggaatgatgacaccgccaggcacgaccttctactaccctcaacaatccggtcaatattatgggcagtgatgaatgactttggcttttttttttccttttcttctctctcttattttatttttttcggatctcacaacatcttcaatttccaccaattctctctttgttctcaattctctctcccttttctttcaactctctctccaggatctacaggggccttgggctcactttgctttttctttcttatctgcatcctcacattctctagccaagttttgcccttttttcctcccctaatttttgtcctagtgtttgactcatttcggtcctggattttgatgcatttgagcgttttcccttgtctccaccactttccccctattgtacttggccttggagagaatcacgtcttgattctagcccttgtcagcccttccaaaaccccctcaatcccctcaactctcctccaatcgggcgatcgaattgccgttctgcattcacccatgcatgacatcatattttcgctggtttctatttgatgatcttgtatactccctttatagggtgttttgatgaagacgaaataaaacaaagccactactgccagtaattcgatccgtccacctgggcactaccacatatgtactccgtagactacgtagttctgacaagtcttggcattctcggcccggcgataaacacgtcacattcttatgtaatccatactgaaagcaagccaatccctcaccgcctgccctgtcagttcgcagcagctgaccgtctctccgcttttccccttcaattcgactgcttcttgtacaactcccctcttattttccttaactctcctctgcttcttctactttctccctcttcatcataacagatcatcattttatcttctggtattcctttcttactcgtaactcagtacaatcttccccctttcctttccatcatagtactgctgccttatctcagaggtgtatccaccctttgacattggcatcatctacgatgacaactccatctactacttctcatttcagtccagagaatctggttactgtcaaagtcctctacaatgacagtaaccgtcgcttcaagatgcctctcagggagctgaaggccgagatgttcccccagactgtaagtctccactcaagctccggatctgaagtccgacttatcttcaacgatcatcagattatatttgtatcgaaataatttgttccaaccctcatcagaaatagcgtgttgttttcaactgacttaatttttcgtctagcttaggaaactgctcggcgttccggcggatgtcaacgtcatccttgaacgctattccgacagtgctggctcttacgttcgcttggactgtgacaacatcgcagtctataaacagctctaccgggctgccaaggcaaagtctaagctccgtattaaggttactactcttccttccaaaaacacatccgccccaaccccagtaccatcagaacccactgtgccgatggagtcaaccaaccacactcgtcacagttatctcgaaacagtcctgagacctctaccacctcccgatacccttcctctcattgactcagcccaattcccttgttccaccggtgagaaagagtttcctctcggtcaacctcgctaccgcaacttcgagatggaccaagaaaaacatcagttcccggtcatctcccacgcctcgtccaacgggatgttctgcattgactgcaatcactgtggccggtctattgcaaatgcgcattatcactgcagcatttgtgagaacggggactatgacttgtgtctacagtgtgtcggtgccggcgcatcttgccgcggtgaaggtcactggttgatcaagaggaccgtcaaggatggtgtcgtcacaaacagtaccaccgagactattcctccccgtgatcaatcaggactggagttcaaccccatgctgcctcggcagattcagcgtgaagtgatcactaagccggtggtccacatccctgagtcggtcactgagtcagtccctgagttgatccaagagtcgatcccagagccagcggccccgtcagcttgtttggatgcagccaccattcaaggtgatgacaagccaatgtgtaatggatgctgtcgtggtaagtcttctgtttctcgcctccctttctcttttctctttgctcacaacacacagaagtcgacgaaatcaatctcgtccgttgcaatgactgcgaggactatgatctttgccttcgctgcctgctccgaaataagcacgggcaccaccctggccataccttccacctcggatctgaccggaacttttgcttgaagaatttgatcacgtctcgctgccttcccggtcggcagttccgacactccgctgtctgtgacggctgtgacaaggtatttactcacacattccacttgcttaggaggttcgcggctaattttagctagcgcatcgttggtgttcgtcacaagtgcttggcctgccccgattgggacttctgtcccgattgcatcttgacttcttcgcagagccaccctggccatcggtttgtgcaagtttacgagactatcggtgagccagctcgtgagcacgaaattcactatggcatcttctgtgatggtccactgtgcaagagcaaacctgctcagagctacatcaacggagttcgctacaagtgcgctgtctgtgatgacaccgacttctgtgcgagctgcgaggccctcccgaccaaccaccataaccgcactcatccgctggtcaagttcaacaccccggtccgcaatgtgactgtgagcaccatgggcgacgacggctcaagtggagcagttgtcctaggtgaccagcctcgtgcccccacttgccccgttgagcaggtcgagattgcggagccggaacccgttgaggtggatgctagcacaactgtggagaaggatgagcctcagccattcgtggacgagccccttctcggaactgacagctctgatatgacggactacagggcgttctttatccgtgacactgtcactgacggtacaaagatggccccaaacaccacgtttcgccagacctggactctctacaaccccggtcctttagcatggcccgttggctgtgatgtgcgcttcgtcggtggagacaagatgttcaacgtcgatgtctgccacccgtctagcgtcgagtctattcgctcggccatggaaagcaccaagttggttgcccctgtggagccaggcgagaaggctgactttactgtcaaccttcgtactcctcaacacgaaggccctgctatctcctactggcgtctgaaactccctaacggtgtggccattggtcatcgtctgtggtgtgatctcgaggtagaaaccgcttctctggaaaaagctgagacccacgagacatactctggcgtatctgaaattgccagcagtggcatgatcttccccaagctagagaaggaatctccggagtcaagcacttaccaagccgaggctcctgccccgcaggcaccgagcttgtcgaattcttcggaagtggacgttttagaagacgttgagagcctgactttggacgataccttcactgacgccgacaccggcttcctgacggacgaagaatatgacgttcttgacgccagtgatcaggaatatattgaagccaagcaggccacaaactgaaaatgttcgaaggaaatcatcacgacacgatatgggaatgggaatttgcgcaactgcactcttttttacttctttttcttttcggactttgccgctgaggtctagtcactccgagcatgactagacttaatgagattgataatttttttttggcctacgaaaacaagcaaagaaaaaaaaagaaccacattttttgcctgagatagttcaatgcactttcgctgttttgaggatttggattgtgtagtacgctaaccctattaagcattgatataagcatcgacataagcatcgagtccttgcctcctccctacatgtatgcagtcaccaagtctccctgcgagctgccaagagttccaagtttctgccctcgcagagattcccgaactgaataacctcgggaattcagtgaggggtcgagaaatggctataaatttggactttgtccctattttcgctttatatccccagattcattcacattcgatacaatgggattaagcatcgtcggcctcggcctagtcgctctggtcgccttcttggctggtccagtcagccatttcgtgcagattgcaggggtcttcctcacgcctaatccgacagtgctagctgcaggccagggcccaatctacatccaagacaccatccattgcgaggatgtgcattactaccgcccggcgaacctgctgttcactgcctgcgaggacgacaaaagcacgcggtttagctggttcccgccaattggccacttcctgccagtcacgacccaaggctctattcatgtcgtggatcccaaggtgactttgttcgaggcagattcggaccaaatatcaaaaattaaccccaaatatagactatgaaatcgactcgtctggcattcgagaacttccaaggcaccttcgtgacacatggaatcgatgtcatcgaggaccccgaggactcagacgccgtctacatttacgccgtcaaccacttgcccaacccggcatactttgaagccggcgagcccaaagacgtccccaaagcccagtcccagattgagctcttccatcacgtcctcaactccgattctgtccgacatgtgcgctcaatcagccacccgctcattaaaacccccaacgacatctacgcggtcagcccagtctccttctacgtcaccaacgaccacttctaccgcgaggggcccctgcgactcttcgaagccgtctggcgctcagccaggtggtccaacatcatctccgtgcagatcgccgatctggcaagcaaagacgcacctgtcgaagcctccgtcgcactgacgggtctatggaacaacaacggtctcgggcacggccgcactgacgacgaagtcgtcattgctagcgctatgggtggcgagatcttcctcgcaacccggcatgagtccaatcactcactctccatcgatacctcgattgccttttctagttctctcgctgataacccgtcctattatgaagacccataccgcactgactcgcatgatgcgagcggcttcctcgccgccggtatctcgcaggccattcgctttttggggaatgctaaggatccgaatgccaaggatccgatccaggtgtggtatacgactctcaattcgcacactggggtctgggagaagaaggtgctgtttgaggatgatgggtctagggttcggactgcgagtgccgctgttttggtgcctattgagcctaaggctagtgaaagactagcttggctctttgttactgggttcatgtcggagagtatggtggctgtacaggttgagctgtagattagaattgtaaaacattacgcactcaaaaaaacaaagaatgttggttgttctttgccctgactttgtctatataaattccacttcctcccggattcaactattcctcttctatcttacactatatcaaaagctctatatatatttcatcaacttaccatctttccagctcttactttatatacatatttccacaagttccaacttatcactctactcgcgtacagaatcgttgttgagtcgagagaatttcagaagtatgtattttgtaagactgctatttctaccaaaaccaaccatcccagttcaaaccaagaagccaaacgaaacgccattgtaggccgtctcctctctatcaaccttgatcttgtcatctcctggtacgaaacacaacttcgagacctgcgatggggaagaaataggaatgcgcaaactcctagctcagccaaaagccttcctggtcttcacctctccaaatagccatgtcgtcgtcaaatccggccctgtgtggagtcttacatatatacaaggaatactatttattcaatatggggtatatctcccgcccatcctcgttgatctaagccgacagctgacatcttactatatagacaggaccaataatcaccagtcattatcagaggtctagatacaccggatcttgttgattcctagctcggatatggatgcagcaaggagggaattgcaacagcgtatcgacgaagatagtcgaggccctgctgaacgctgtgttgcgctcctctatgttcggtggatgatatccgcctacattgcatactgcgcgttgcctctgacgatcctgttgtctttagaaacctgcgactattttccctgcccgacccagccaattcctgccgccactgtaccaatagtcgcaggtttctaaagacaacaggatcgtctaaggccgcgcaagacacagtactatcagaagttctaagttctagcccggtatcaggtttaaaaccaaagcaactgcttggattgcttcttgatacgtcgattcagctttgattccaagtatattcgttattgtctcctcacatggaaaacagggccgcgatataattaggctcgagtaaacatagtggttgaaaatcccaacacctttagagacaaagttcaattgggttgacagaaagcatgtagatgtctgaaattgaagtgctagcgccgctgcaatgcaaattggaagaaaaagccaaggtaaataacaagatttaaaataacaccaagtagtacaccacattcatctcatcatttgatttctctgcttcatctgtctgacttgcccggagtctgggaagagaatgaacagtacttgtccttgatcgcgatgacctcgtaagttccctcatcagaggtcttgatggtcttgacgttttcgtatgaaatgtcgtgtttgatatcaagaatctccgacttctttcccttgcgggcattggagctccgaatgtatctgtggaatgttagcagactgtcatacagagcatagctagagactattgacttacgtgaattcgaatggtggtgtaccccagaactcaaagtgaagctcggcttctccaccctcgtgaatatccaccaccgattctttacccttgctgatccgcacgctcggcatggcgtggataaccttggtgatgtctttgtgggccttgcatttcccactggctccgtcactgacggcgttgatggtgaactggccgggaagttccgcaatacgacggaagttggtggtttgtgtagtggccttgcgcttggcgccatcgaacgtgtagaacacatcaaatggagcatggcctgacagcgcgaatgaaagtcgttcgcccacacagtagtccatcttggactcgagcgggacaattgtaggaacgtcggagatggcgacccgcaccgaggaggcatcaagctcagtggtcctttgacatcctcgagaatcgcgaaccttgtggatgctgacttggtgttgccccaagtcaagatggcgacgaggaatcagcaatttatggcgattggaattaatcttggaaatcgtgacaatctccggtttggcgttcgagtggtgtttgatgttgatctccagcgtgaatggtgggacaccctctaaggtaatggggatggattcctcgccgttgatgtcttccttgcagaagccaaagacgtggccaggttggtcgaatttagcagacggtagcgggttgaccttttgtgtcacaaccagatcgttgctcttgggatcgtggtcgtagaggctgtcgccaacttgggtgaacttgtagctgtattctccagcctcggaggtatccatctccatcgaagtcacatgaagagcagacttcaaagcccgtggcttcgccgcagagaatcctccacggtccgtcttgcgtcgcttctcgtattgaacactgtatggaggattgcccgacagccgaacttctaggctgtcatcgtcgccttgacagacctcggactttgcaaactctttagcggctccaatgggtgagccgtccagggcagtgatttcgggccgtggaatccacgagacctcaaattcctttgcagactggtccacggttccaggacaaccggcgtcaaatacttccatgatctcatacaagccctgcttgtcgacggccaagacactgttttcgtcccggaaggttttctgaacgggcgccgattccgcgtcaacattcttgtacttgacagtccaagggcgctcgccactcagcctcaatggaagctcaatcttggagccctgcaaagccaagacacttctcttcttgtcaatctgaccgaaagagacgtgcgggggctgcgagcgggcttcaatattgatgctgtccttgagagttcgtttgcaaccagagatatccttgacgctggtcagagacacggtgtagtcaccaccgctgaccagtttgtcagtcatgatggttgccacatcggtatcggattcgagtgtcttcctgaatcgcttcccattgtggacgatctcatattgcaagacccaaggggcctctccaaggaaagatacttccagagaaacagcctcaccgaaacaggcagttctcaatcttcttgataggaaatgagccgaagccggcggttttacatcttgttcaagcaccggaatgttgagagaccgtggcgagtagacggcatcttcgatgtctatgaatcgataggtgtatgagccggcttccgacggggtgaaatcaagctgcgtgcgcatgccatcgatggtttgtactttggaaacaacgcccttggagctctcaatgctgtatcggagagagaaaggaggcgatcccgtgaggtccaaatccacaagtaacccaatagcgttgttggcacagcggtcgaatatcttttcagctttgactgtcaattctggctcaggcgggttatgcaactggcaagatgaaggttcgaggatctctccaggacaaaacttggtagagattgatgtcaaggcatacaaaccaggctctttgatgtctaaagtctgattcatatgcttcagatcgacgatctgttcacgtgctgcttcttggttgttacccgtgaacgaataaccgaccgaaaagggaccatcgttagtatatgcgtgaccgtcgggatgaaagctcaaggggaacctcgtgctgtctcccttggccacttgcagcggattctcggaattgcacgtttgcagtgacaactgcgggcgctcgtgaacggagaattggtaccactgggattgcgactttgtggacggccgatctccttcatcaaagatggtagaataattggccacgtttccaatagcatcatggacctcttcgatggtgtaaaaccattctccgccgtcgttcaacgattcatttaatggaacctcaatcttttgactctgtgcccacgaaacgtcgggctggttgatgctgtacagagcagccgtagttcttccattgagcagcggagagcgcagatgatcgggctggatgttgaggaccgagaagccacgatcgagattgttgacctggcgactgtatttgatcttcaacggaggtgtgccttccacctccagtttgaagtcggataattctcctttgcacttgtcgatgtgtgagtttttgatcaaggctcgcgggcaagagaccaccagcgcatcaaatgttcgcgtatgaacatcaagctgagactcgtccaccacccgttggagacgatagacacccgttttgcgcacagggaagagcaagtcgcggtggagttgacccggaacatgcttcttttctgcctgctttttaagagtcttcagctgcttcgctggaatgctaatggtttcattttcgccggtgttaaaatctagacgcaacacttcgataaggatcgggtcggtctggttgacacggatgggcaggtcgattgtggattgcagagaatcgaggcaaagcgagtttcgatccggattgagaacggcagatctattataatgtcagtatgatctgaggtgggtatattcgaacgggatagcttacccctccggcagaatgtgcacaatttgccttcccaggatcaatgacgcattgtgaatgatatcgccgggcttgaccctgcgctcagaaacggataattcgcgatcgtatgccacctttactagtccagtaaaccatgcagcccaaggaatctgcaggcattagcgcggatcgacagtttaaaaaaagaagaaaaaactcactgggatgcggaacatcaaaaagacattgcccacagcatgaagaaggaatagagtgagcgtggtcgggaatgcccactccagccaaggtatacgcagagcctgcagcccaaccaagaagattccatcgatcgtggcccatttcaacaacaaccaggttgagtcgaggtcatcggacgcagtcaaggactcgtaaatccgccacgcattcaaggcaaaatatattgcaacgacatagagtcgttgagatggagcatcaatcaaattggtgggaatcagtggcacatcggtgttcgcgttcgggggtggtggtcttgacgccctcgaggccgatttggatggtgatctgagtggcgttcgcccagcccgggtctctcgtggctgcgatcgcgaaggagtctcaaatagttttctccttccagttccagggattgttttaggtgtctgcggaaaggcagatgggaggaggggagtgccgttcatggcatgctgtggttgccggagctggcgaaagatgggggatgtagtgagagtgcgatgctggcccttctagagctgtaagaagttctaaatgaagtccaaggaaggtgtttggagctgtccagtggtaattcgtgcctatagcagatggaaaaagaaacaaaaaagttggagacgcgggaagcgcgtcgggagaagctcggcccactcaacgacatgacctaaccgcttctccctgtccctgtattgtcttctattgccgacgtctggtgtctagttctataaaagatctcatatttttcaagatttgatacctggctccctttctgttcccctcagtgggaagagcaaacttactatcatctcaggactccttttatcatagcttcctctcatttcaatctcatcttgaagctctaaagctctacagctctacagctactacttttgaaaagaaccgaaatgggtcctcgagttaaaaggcgccgcctgatggactcagacgatctcagtgatgatatctgccagcctgcgtcccgtctggaaaaagacagctggaatgggttttgtgaaatcgaatcagaaccggtatgtttaactgacagtggccttagcggttctttgcttacggaattaggccttatttaatgtgatgctacgtgaattccaagtcaagggtgtaaaagtccaagaagtcgtttctctcgacgaagaaatgatggcatttcttaagtatgttacttgcagtccctctctatgctcttacatatagactcgatggctgactatgagcagtaagcctgtttacggcttgatttttcttttccgctggcgtgaagataacgatggaaagcaggaagcgacttgccctgacgggctgtggtttgcaaaccaggtcagtcccctattctttggctgaatggtcctttactgattctttatagaccgccgacaattcctgtgccagcgtagcactactaaacattgtcaacaacatcccagatattgatctaggagagaatctacggtctttcaaggaattcactatgcctttcaccccagcgttgcgtggggatgcaatcaacaactttaaatttgtgaaaaggatacacaactcatttgcacggtaagcccattggcagcttcttgaccacccagatactaatttgatattagaaaaatggacattctcaattcagatttacacctcaagactgaagctaccactaggaaaaagggatccaggggccaaagtgctgatgaatccgacgccaccttccatttcattgcctttatgcctgtgatgggccaactgtggaagtttgatggcctggagcgacagccacaagcacttggtatgcactcttacaaactagttgggatgacactgctgactttagtaggggaatgttccgaggacgactggctggaactggtccgacccaatcttcaggaccgaatggctgcatacgaagaagaagaaattgaattctcgattttgggactcgtgcgagaccctctgactgatctcatcaacgacctggctgtcaacgtgagaactttggaaattctcaacaagcgtgcctcatccctatgctcattatcagatacgctcgatttgcatgaatctgatgaaactgtacttggccctgacccttccctatctctgacacgcgaagagattgatgtggcagtgatcccccaggaagcactggatgattaccagacgtgctccgatgagaaattgcacgagtatcggcagaagataagcaggaggcagcgagaactccgtctacgcattcgcgaagagcagctatctcaccggtcggattatgactacgcagccggacggcggtttgactatgggctagcgatacggacgtggctccgactcttggcacagaaagaacagctgcaggagatgtcgacccccgtggcctattgattggatgatatctgctatccctctccttttctatctcagacgtgcttatcaggggacgtagtgatgtgacctccgtttccccctcaattgatttggcgtcgagtacttcctccatgtcgatcatcctagaaatacgcaatatataccagaaatctaagaaccataacaacagtcaacgtcaaaatataaaagccctggaaagtgacgcctcaggtaccccaccgggcaaaaaatagttcaaacgtcaccgcctcgaatgttgttgagcttctcttttccaacctcctttttggatgatgaacttttgattttggcgtggaagtcttcggaaacttgaaccatcctattatccttgtttcggaatagaggcagggcccgagagatcccctctctccaatttgccaccctttctattctactccccatctacctcaccctctctctttctctttctctacaattcctcgcttgaacatacaccatgtctgctgtcgcagtgcctgaaaaggcaccagatgactcctccaagctgaagaccttcctctccatccttcgaaagtaggcaacccttccttggcccccgctccgctccgctgcgctgatatagccagatctcagacactaatatgatcgggaattaggttcgtcggtgtcgcagatatcgcttcagttcgcttttcactcccggcacaactgctggagccgcgaccaaacctgggtaggtcattgttcgtgttacgctgtgcggggtcagtgctgactgtggatggctacaagaatactggcattatctagatcgaccggagacatttgcgaggtcaggaaatatgcccatatttggcggacgcttgtgtgctgaccaggagctacagcattggcaaatcggatgatgagctaggtcggatgttggaggtgttgcggttctggttcactaaggatctggtatgtttcggctgctcggattcacttgactacttgctgattgtgctacagaaatacgtcaaagggaaaccctgcaaaccatacaactcaaccctgggggaattcttccgagtgagtcccagtttcttcggcatttcaatcacggcaatccattgctaacaccctttagtgcagctgggacgttagcgacaatatccccgaagaaacaaatcttcccggtaccaaaggaatcaccaatggctcctccaccgtaaccgacggcgacgagaaagtcaaagtatgctacctcacagaacagacctcccaccacccgccagtctcagcattctatatcgactgccccgaacgaggcgtctcagcgcgtggatttgaccaactcagcgccaagttcaccggtactagtatccgggtgagcccgggacagcacaacctcggaatcttcgtgagcatcgaaaagagaaacaacgaggaataccagttgacccacccaaatgcccacctcggaggattactgcgcggagcgctttcagtcacagtcgccgacacatgctacgtcacctgccccaaaacgggcctgaaggcgatcctgcagtacttggaagagggctggattggccggtcacagaacaagctcgagggcgtaatattccgctacaaccgggacaatgatacgatcaatcgactgaaagatgtaccagagagtgacattgtcgctcgtatcaccggctcctggcatggaaagatattcttcactccggcgggcaccaaggagccccgtctgctcatcgacataaccccgcttaatcccgttccaaagaccctgcctccatccgaacaacagctgtccaacgagtcattgaagttctggtcgggtgtgacgaacgccattgtcgagaagcagttcaaccaggctaccaagctcaagcaggatatcgaggaacggcaacggcagcgggctgcggagcgccttgagaagggtactgaatggcgcccccggttcttcactggcgccgtgacgccgttgggtaagccggagctcacagaggaagggcaaaaggttttggagggaattcgctcgggcaacttcgctttgacggaaagtacagagcagggcgcatagatctcattgtgtttcccttgtgtaagcaacgttggcgtatctggcatgcgaccatacaaccatcgaacacggcgtctctttgttttactcccttttgatctcttttctggttatacttttattctcacatagaccttattctttagaaatctgttttggattacaaaattgaaatagtatatcatacataggttcaaatagaacgattaattctattcataaaaagaatcacaaccgttggtccatgctaacgccgccagactccaatcatcaagtacgtcaacacataatccatttcagatcccgagctcagtctcaggctgcggcactaactaccttgaaccctgtactgacggtcttggtaatctcctcattcttatgcggcagaagagacagggcatacgcaacatcgttccactgtcgctctgtttcgcaacgaggaagtcgagcggccagcttgtcggccagctggcgagcgtgtttttcctaggctaacattagcatagatcattataaacgaagaagagagagaaaaacgtaccttctcgacaaaaccgatcaagaacttgacgatacggcggagggatgcttcatctagattgcgctctgcactcagcagactgaacatgtcaacaaagtggttgtagacggcattgtccttggttgcaagttccgtgaagaacatgcgagccagatccgcgatcttcttgtcatcatcctctagacatttcgccatctcgcctagttgtcccttgaccttgacttgcccagccaagatgaggaaggtaagggtcatgagacaggtgcgcttgacagagtcatcgtcatcattcaaacgacggtagaggaaatctgtgttctcgtcgatgaggtggttgaagcaaacggccatgtcgcctagtgcaatgacagcattgctacggacgataggatcttcggaccgctccatgatagtgatcaggagtggcaggttcttctcacagtactcggcagatacacacatgagtttggcaaggcagagcgtcgcagaggcctgcaagtcacgatccgggtaggagttattgttggccaaaatctccactacaagcgggccaaatttggccaagagggaattctctccatagagtagctcgcgttctcggatatgggccatggcttcctggaagtcgtcttctgttgttccgccgataagatcaagttcgtctgcttcggcattgtcttgttcatggggagcagtggctgctttgttcttctcttgttcgactttgcggcgtttgaagtcaagctcacacagctctagatgcacgatctgtttgattgcgacgtgaccgacaacgtacagcaactgtgagagtgcagcggatgctggcttaggcttggattcctggccatcgacggatgcagtctcaggccgttgttgctcctcgtctccgctgatagaggcatcggaggaaggtggacgctgttgtaggtgtggcgcaaagacgaatctcgtctttcgtcgtaggatatcagagcaaataacgtcaggatgcttggacaaagtgtaaatagcgttgagggcatgctctgccactccataccattccttgctggctgtttcgatctcaagcatggctaccaacttgaccaaaaccgagtggtcgctagcgagtttgggaatcccaacaacctcctttgatttggcttgacgcccggggatcatgcgccgcaaagcaatacaagtgtacttggcgagcacaaggtcagcccttcctaagccacctagaccaattcgcagcatggcctcgatctcttttaccacaatctctggatctgccagagcaagcattccgagaacaatgatcgaaccccggcgctgagtccgtgagatttccttcttctggatactgtagacttgccatagcttggcaatcactgcgtcagatacgtttccagccttcatcatcgtgctgagcaactgctcgagacaggtaagttcggcaggagttgcaccaaacgtcaaactgatcatgttgcgggcgatgtagtttgcagcatcgttgggtgtgaaagagcctggtgcatcgaagaaaagagccttgtaacaatcaataagatgtgtctggacgccttttccttcatcgctgttgcccttggtccaaatcaggcgcagcatgcggcgaattccactacgggcagtctcaactttgtatgcatcgagaacaacaaagaaatccatggcttcaataacctcgctcttgttccgggatgcgagtaactgtgtcacgataatggacccggaatgaagcacttcaataaaccggattgcctcgttgtaatacttcctcgtcagttggaggcgtgtcatcaattcagaggtggccgcctgttctgcggctttctgcacagcaacagccttctgttcatcactcatccggggcgcttttgacggggaatcatccgggatctgtgtagcgtcatccaacaattcgggatcaacctgagtcatgtcgcctgccccaaagccgggcgcttcagcaggacgcagggaattcaactcggcgtcaaccgcgtccattctatcagtccactcctttaatgagaggagcccgccatgcataacactgaaaggatgtgtggaaacaagcttggacagcagtttgatcgcgttgcgtcgcacattgctgctcttatcctccaagcttctagcggcgagttccgctgcagcctgtcgccttttcgggaacttctgctccagatcgcaaatccgcatgaatacctggatcgcgcgacaccggcagtaagggttgatatcaaggaacctttcttctaatacgtcgaaaaaggcgttgatctgggtcttataattatcactgcgttcttcctgccgactgagatcggaaatgaggtttccacagacctcaatcactgcacagcgaagagtatatgcctgtacctgttagtggagctttgggcaaattaagagtatcactcacgtcactatctagctgtttagccagaagggtcatttgcttgatgatcaatcttggcgcaagttcggacagtttgataatgaatgtcgatacagacttggggcctctcgtatcattagaattaaattccttatttccgagctccctacatgtaaagttagcaactatccggtcggtttgctgatataatctcactttaggatctcgtcggaaagctgtggatagtcgtattgttctgctagaatatgcaggaattcggccatgggttcagacagatgttcgaagtaagtcaagctttgcacaatcgaagtttgagctcctatgctagagtcagctatcgctcagccggaatatgcatcaggacacctaccaaaggcctggccatggtgcttgactgcaatgcaaagaaccttgaaagcatgcatgcgaatggccatgctcttcacccgctgctcgctctcgaggaccagatagattgtgcgcgtgaatagggtaataaaagtgtcacgatccgaagtggtcaaaaaaatgcgtcctagcttgagcttcatcaccttgcacatcgtctccatggatatttgaatctggggcgtccaatcccactggccgctattggcggatttcttagatttgggtcctcctcgtcgaacgggtgctgcctcggtgggcttctctgcagccttgacctctacggcagacaaagcccactggagaaggaacccgtacatctccaaaagctgcttatggtgttgaataacatcctgctcgtcggattcaaggtctccgtggatgacgtctgcctcaacagacaggccagaaacaaccaaatccaaaagtttgctcaagtgctttgcaggaagtagggtcgcgtatctgcaagagtgaaaaggatcgtcagattcgagtccaagcgggcgccagcctccatgggcaagttgggaagggaccggggcgcactttagtagaaattgcagcgagtcaaataacgatgctcgtgttaatgcctcggggttctctgccacagcgtccacgatcgggttcaagatactgtcaatcagcgccggcgaaagttgatccggatccgattcgcaatccaacagttccgggtccgcatcaggagtcgggatcgaagcgggatcactcaaatagtacttgagcgactcatttatgttgaactcgattctgtcctccattgtggtgtcaaatgagaaaaagaggtgaaagcggggaggaaagccgatttgttgataagccccgttgtttggcttttgcctgtttgggtgcagcttatgtcatcatgttgtattttaccgctaatgctgtgccagacccctctcatgtgttaccgcaccgccttgtattgattgatttggctaccagtcgtattgtcatatttgtcacgcgtggtaatgccaacctaggttgttgtgtttgcattcttatctcggcagttgcgatagaacattgaaagaacttgactttgaagcaacacgcgacacgatcttatgactttgtttctccactttgtactcagcacattgaattcgaagactcctcattgttctccgtgccaccatgtcggccatacgcgctgctcctggtgtatttgagctgaagcgcaacaagtcccgtcatgagccacaattgcaacacaaatactcgctgggacacgacgatgaaccggtctcgccaagcgatgcaccccaggagagtgaatatgaggaagaggtggaggaatcggtcagagaggatatgagaaagcttgaagacacattcccaggaatctcggatcgcttccgtctggtgaataggatcggagaaggtaggacttgaccggttccccgtcattggcgggcttctttattgacaagcccaataggtacattctccacggtttataaagcagaggaccttcattatgatgcacaccaaaatgactgggatgtttcaacaccaacacaagacaactatgcggagcctccatccaaacgacggcgattcggaagggagccaaccggacgaaaaaaaacgaaattcgtcgcattgaagaagatctatgtgacgagtagcccgctgcggattcagaacgagctagaactgctgcacgatctccgaggatgcgggtctgtctgcccgctgatcactgctttccgataccaggaccaagtggttgctgtgttgccctatttcccccataccgactttcgcattcaataccgcacattcatggttgcagacatgcgccattatctacgatccctcctgaccgcattgaactcggtacatgaacatgaaatccttcaccgtgatatcaagccgacgtaagtttcattcttcgacggcctgaattatgctaatatcttgaagcaactttctctacaatccggacctgaaagaaggcgttctggttgacttcgggcttgcggaggtatgattattgaccgccatatgttgatgcgtttactgattgtccccacagcgccaaggctccgaatacaccaacccatgtctatgtactcatcaaagctacgtccgtcgaagccggatcctttcaagttactactccaagaaccccccatccacggggttttcagccggctaccctaagaatgattcacggccatcacgacgagcgaatcgcgctggaactcgaggctttcgtgccccagaagttctccttaaatgcacgtcacagaccacaaagattgacatgtggtcagtgggtgtcattcttttgactctactgggacgtcggttccccttcttcaactctgccgacgatatcgatgcgatgatcgaaatgtcgagcatcttcggcaccaaacgcatgaagactgctgcggccatgcatggtcaaatttttgaaacaaacatccccaccatcggcgagaaaggctacagctgggagaagctggtgaaatggtccagctgtgtagaagatttgacggaaagtgagcagcaagcaacacgcctcttgtctggactgatggaactggaaccgtctaagcgcctcagtgccgcggatgccctggagcatgaattcttcacggatcccgttcaccatgatgtgccatggggaggtaacccagaagaaagcgcagaatcaggagaggaggaggaggcagatgatgcagacgaggttgccatgctatgagacccaagattatttgtacgatatgtgagatcagttttacgccatacactgcataccactttattcagggcaatgaagcagccttcatatgaacaatcccgctgtatgcctatctatccggtatgcaatcttttctagctcgcttctccgaaatcgtagtgcccggtctccgcggcatgcttcgtagcacctttctctccggtgaatttgcctccacagacgttacagcgaacagtgaatccagaagtgtccgtgtagtagtgcttgctttgcaacacctggcatagttctttagccctttgcaagacaaccggatcaacagcctcaaagatctttgtgtcatcatgcgccagtggattggcacgagtgtagggtgggtgagaaggggacagcgcaaggacatcgtaatgaatccccgaatagaccacaatacaccgtgttggtgctccctcattaaactggaacatgtgcaaagtctgtacatcgatggagcatatctcgatattgaagtattcgctgagaatcttgagttcgatggcgccaccccacgagtcctcgttctggatccaggtacagtattcgtctggttttttgcctaaaatcgctgcagtatattcggacgggttggattgaatagctcctgcgacgatcgatcgtagctcaaccatcgtatccatgtcgcccatgactgcagagcccactgctcggaaaaggcacgagttgtcgtcgggcatcacccggagaacgaacgttccggcatgctctggagaggcaatttctggcgggtcttcagcggtgttctctggtcgtctttgcgacaatgatggctgcgacggctgtgatggttgtggtggcgctgttcgggctatgggcgcatcatcgctcacgccccggctggccccctctttctgtgcgacgatgagtgactccccatttagatttatcccaacttctaatatcctttggtctggttggaagctgtcaagctcaagtggtttgagagggtatccgtatttgacgtcaaaggcagcaaggccggtcttctccgctatttgggtttggagatcttcgatggttgcagtgtcatccaaggtgacagttgattggcctgaaggcccacggactcggattctcattgtgatgaagtcccaaagaggccaagacctaagggaactgtgaggtatgttgtagataatcttaagaacggaggttccactgatagggagatatgacgacttccgtgtggggtagttatacctgggtacggagtataccaaggcagtctggaatgcaagccaaatggtatgggccctaagaagagatggactgatatgtaaatcagtagtctgttcaaatctaaaacagtgaagtcgcaaaagactgtaagtaaggggagactacccaccaaactaatcattgcatgcatgtagccaagagctgcatacatattgtacattgaaagtacgctgaggcgtgataacttcaattccagtcacagcagacagttgtagcaaagatcctcatagaagagacgtgaatagagacatgattgagcccaaatacagcctcttttaatgaaaagatcatgaaaggtgaggccatcgtcatggaatgtcacgtgaaatgtcatggattaccgtaatgtgaaatggccgctgagtcagcaatagcttcacctgtccactggacgcgttggtgaaacatcctccgacatctacagggtcccctattgtcttatctgaattcgagcttgcttcatttgatttagtctaaaagattgctaaatttacccttgcgtggaaacgcgcgtgtcgccaacgacatggagtccgaaaaagagctatcgcaacccccgcgcgagcaacccgtcaactccatcgagaatgacggtgcgatcacgcgcgaaacttggaaaatcatgatggatgtggtcctggcaatttatgactaccgagaagaggagtgcgactgactttatatgagatatatagcgatcgctggctaattgttatcttgcgcagtggtcatgacccgtcacgattgttccatcgcagtgtcaacaagcgctatgttcccgactactatgagataatcaaggagccgatggccctgagtattttgaaagcgcgcatcaacaaacgtgaatacaagcacttttccgaatttgtccgcgattgcgccttggtgagtggttgcgccctccagatttgcaactagctaacgatatagatcccacacaatgcgcagacatacaacagacccaaatcacaggcctatgaagatgctctagttgtcaaagtatgtctgagtaaagccggtcaccctgggcattcaactgacagtttccaggaagttttcgccgccgagttcaaaaaactggccgcccaaggcctgatccccgccgacgaggcagagctacccgatcttggagagatcccagaggccgatccgctgccggatgatgaggaggaagaggaggaggaggaagaagatgaggatgacgactctgaggatgagggccgacgaagaaagaagcccggtcccaagcccggattcaagcgtggactgactcaaaagcacgaacccgaccttcgcaagaaacgaggccgtcctccccgcgtggacacacctatggaaatccgcatcaaaacaattctgaagggaattaggaagttcaagggagccggtggccacctgaagatcacacactttgaacgcctgcccgacaaatccgcttatccggactactacctggagaccaaggaacccatcgccatcgatattatcaagcgcaagtccaagcgcaagaagtacaactccgtcgatcatttcatgcgggaccttgacctcatgttcgaaaatgccaaggcgtacaaccagtcggacagtcagatcttcaaggatgcggttgatctgcaaaccgagtcacgaaagttggccgaacaagaaaagaagaagcctgatagcgagttcttgatggaagacggacgcttcccactccctgatggtattctccaccgcggtgaactgtggaaggttggcgactgggttcatatccaaaaccaaaatgatgtgaccaagcccatcgttgcacagatctaccgaacctggcaggactccgatggggagaagtggatcaacgcatgttggtactaccgtcctgagcagaccgtgcatcacgtcgacaagcacttctaccccaacgaggttgtgaagactgggcaataccgagaccaccggattgatgagattgtggatcgctgctttgttatgttcttcacccgctacagccgtggtcgcccaagagatcttgcaccggataaggaaatttacgtgtgtgaggctcgctacaacgaggagaaacacaagttgaacaagatcaagacatgggccagctgtctaccagatgaagtgcgagagaaagactatgagatggatctctttgatgtgccgcgcaagatcaagaaaattcccagtccgatcaaacatcttctcagagaggatgccaaggagaccgatgaccttcctcggccaacctggggaaccgacaatgccccccctcttgccggagctgttcaccgccgtccacgagatgagaatgtaagtctttttccccccacatgagaaaagatcctgaaagctgacagcattaggaatcaccaccacccgagccaactccatccccgcctcctccttccttgccccagtctgtagtacctcgtcaatcactgggcctgggccaatcactttccagaacagccatgagcccaggcactgctggactccaaacacgtactccagcacccccaatcatcatacacactactcccgcccccattcgcccaccgggcttccatcaaatgaccccatcccaagcctttacggcgtccctccagcgccgcgcaagcaaccttgctaccccgcaaaccccagcaggcgcataccagccctcaccatcggcccagcaaacccccgccaccggctactctcaaagccgcatgcaagccccaccagccgtgtacaaccccaacgcaccgcggcccattgaggtctttcacctgagcgacacagccaacgctgccatcccagaagacatccgcgaccaatttcactgcgacgaccaagggcacgtgctcttcttctccacaccgccggtggattttatcccgccctcgaagaagaagctcggccattccctcaaatacctcgctactaaggaggagcatcagaggaaggtcgcagagcggaaacgcaagctggctgacgagaagatggaacgtgatgaggctgcgaagcgccagcgcgctgaggtggagactgcgcttgcggcccgtgccgaggcgcttaccggtaaggcgcttgagaccttggtgcagcacgtcgttgcgggtacggatcagctctatgaatctctccattaagcatggatgatgctatggaccttgatggaacgtgcgagcgtggttctgcgaggaatcgccaggctatgggacagtctgcggagaatggtttggtcaatttggaaggtactgctttgtacctgcacaaggcttacggagaaaaggcgaacatactggcgtggcttggcgtaatcttcggaggcattctgttttagtttaagatgtgtatgattaggtatcaaatgaaatgattattatgtatgttactcctgttagttctaactagccataccaacctactccttttacgaagactagtatcaaggaattgtttatttgcacatctccagtttgtacatgcctgcagtcctgagaatcaaaaccacatattccgacagtaggggacaaaaaacaagggagaagaagacaaagcaagcacctagtaagccccagagatcgcagtggtcgtggaatcatgaaacaaaagcagagatagtaaaagaggcgagatatgtcaacccaggtacagtgcaatatccatgaatggaaacgaataaaaaacagagaaaaggcagagattaatacagtaaatggctggttagagagatcctctgaaggcccagcaacgagaaacacatatgactggtctaaatgattccaaatgatggaataaaacaaggcagatgatgctgagtgccagtttatgatgagagggatgtgaagtttttttttttgtgccttttgtttttgccgaatcagatatctcacttgaggagaaaaggatgtattgtcttcgaaccttcttttgttttgtctctttgatgtatgttgcccaattgaactccgatgccctttttcctgtgtttttggtgagtatgaacatgtcccaatgttggacttggacttgacatgtcgtgatgaaattgattgaaaacaaacgacagattaggaggaactttctttgttctcagtccacgaggcactggtccgcttgtggccgacctcttcctccatgtcgaagaccaggtcactctgctcttcctcctcaatcttgcctgtgttgacaggaggggagatgattcggtcaaatcggccgataggagtaggaccgataggggtaggattgctgagactgctaggaatggcaggcgacggacgagcagaaccagggtgaaggcccatgccgctgagctgctcggagataatggacattgaggattgacgtccagggctcgagatgaacgacgcttcgtgggatacccggctactaccaatgggtcccaggctagggctggtgattgggttcagtgatgactcacggagaggagagccgatgtggaaagaggaagagccgtgagattcctcttccttgcgctggcgctgcttagcaaacaatgcaccaaagcgagacgggctcgacgccaggggagaaccattcttggaaaagctggtgctggtcatgccaaggccagtgaggtcgcggtggctggagctgaggtcgttatcggtccgggagaggcggcgcagcttttcctgtggagtcagaacatcgtcgtgcagattgaatggtaggtaatcctcttccatggggaagttctcatcccattcctcaagggccgtgggacgaggaacactagcggaaaacatgcgtggcctgacggggcgcgacgagtgcatgaaccgggtaccgactgtatcttcaggggcgggaggagaagatcctatgttcgatgaaggcttgcgcaaactggtgccatagccgagatcgcccaggttccggaatatatctgcatgagccggtctctggggtggtggcgattccaatccaaattgcgagggcatggaagcagccaccggaccgtaacgggcagcatgagagataccttgactgtcgaaggaagccgggagccctgcatcgagggcgctgaggtggttgttattaggcgacatgaggtatcggacatcttcagcgggagatccatacttggagccggcatcggatgccaggcccgtatcgatcgtggggattccatcataggacggctgttgctgcccatgcagggattcatactcctcctgtggggccagctgagcatatcgaggctgctcgtgaccgttcatgcgctgttgggagagcaccgagttggtcaaggcggagtcctggttgacataggcctgcggattcacccggccgcccagattgagatgaccgcttcctattcccatgttcccagtcggccggttgactctccgtccatctggtaggatatgcgccagtgcgcattttgcgccgaatttgcagtttccctaaaatcattgccccgttagcttccgatggcctcggataacacgccatgagaggaggacttcgaaacagttccgatttcatacctttgcaaaatacttgcacggagcgtaatcaatgccggcatcggtggagtgtaaaaacggacaggcgggacctgcctggcaggcaccctggcggaaaaatttgcaaggaacatgtttggtgtctgtatatatgatagcagagggttagtttcgcattcgggcgtcgctacaataatatgaatgaatcaagtcaagacttactcttattgctctggttcggcgggctgcgggcaacgtcaagtgccgatggattgcgagaatgtccgttctgggggttctggggtgccccagaggtagccggaagaggcgcacgacctctcatctctgaatgattggctcgacgagatggcggagcacgagaagacacctgcatagagacgtaggaggggttggagattgaagaggggaaagagagataggcccaggcggtggagacggcggggagatcaaataatagatggttcacgacaatacgaagaactgtgaagaagtgaagttaacgcggcgtattattagaataataataacatcattatgttatacgatctcaccacagccttgtctcatatgataatgttcatctgattacggttcgcctcatcccgcgttgcctccattccataccggcgaatcagatctcccatcggaaatagaatacacaccttaaaacctctagaatccccccggtagctctcacactaaacgtgtgcatgagtgtcaaatgatgtgactcgggtggggactaggtagagagatcaccactccgcgatgacctcttattggagcgttccttcaagccccaaagattcctgataacatttgtcagaattccagagcatggacgattggagagctttgaggctatgtcactcgtcattcgcaaaaacttacccagagctccgccgcagtcatgtcctccggaagtacctcagagcattggtcccagagatcgcgacagatccgacggcgcaggttggcatgtcgttgccaatatttccattctttttcgagtttttctcttttttctggtgatatttgaacggggtcgccctcgtgacgacttgccaagcgagcttggatcgtcgattcctcgctctcaagacggctgatgtcctgccggagttcggatattcggggctttgcgtgcagggctgctaacgctgctcgggccttcttttcgtttgcctgtacagttgaaatctcgtcttcgagcctttcaatatcacgctggagagctgcagctatctctggggttgtgatatccgagggatcttgcagagcatggtaaactgtctgtttgcctatacgtcacttggttagtatgtctttctgttcaagtatgtcagacttaccagaagctctcccttcgatctcgttcttctcgtgcaagtcccgaagaagctttgcggcttgcgctagaagcccatatattaggaaagcatagacacggtcatagaaccagtcttacttttggtcaccttgttgtggagatttgcagagacatcaatggcctagaaaatgcttggtcaactctctgttcctcaggctgtcatgaagagagagcgaaccgagtatggacgactgagccaggcgatgttagtcactatctcgagtatcaaacaacttattggagctaacatacttttgttggcctgaaaatccacccggtaagtcattgtgagcaaacatctgtcaaggtccagattctgtccagatactcacgaaggtattctcggatcattgaagcatctttgcagtcaaggtcagcaggtcaacaaggatttgatcaagagaatttctcaccattatctgcagatgcatctgtcttgggcttacgtggagccatggtgtgatgattaggaagatgtttgagattgggaagatgtttgaatgtactgggttggtacgagttggagttcacaccggtggacctcacgtgtgtgaagtgactacagtgacactacaattcgaagactgaactttcaatgacaataaattcacagtaaattcacaactactcctaattcatgcccaaacttacaacccgaatgataatatgtccagggaaaagaaacaaaaaagcttaaggcagatatgaaatgggtgcaaatgcagtcatgtggaaacaagaagccattgagaccattcgcctcccggacggcgaatactttttgaacccccgagattatagaaagtagagaaaatgcaagtggaagggagacagccaaacgtgcttggatagggaacagagcccggggtatcacatcacaatctgcaaaagtcagctttgagtcaagttcaatggctaaaaagtagggtttacatacgcaatcactgtctttcgccgcactaggaacacccatctcttcaaaggtcttgggtcccttgcttggtggcttggcgggcttcggctggggcgcggatgaagtcgacgatgcgactgagggggcgaccgagggcgcgatcgaggacgcgatcgagggcgtcggttgaggcgtggaggcacccgaaccgtgagaagatggccgagactccatacgtggaggaaacgagggcgaaccaggcggacgaggagataccagaccgggtgaggacattccggagtggccagcagtaggaggtctcataggcttgcgttcagccgagtcaagtcgaggtggtgggcgtcgcccacctggaggcggcattggtgcagaataaccaatatcgagacgaggagccccaccaggactgaccatgttactagcctgtgggcttgtaggtccaggaggagcgctgagaggtgctccagggacaggttggcggtagttcatgggcccgttaggtccataggacggattgtgagatctaggggggccttgggcaggtgggccaccatatcccgagggtgcattggttcgaagattgggaaggtttggattgacgccaaaagcagagcttgggcgattgtctgacagttgataactctgctggggctggggccggggacgagtagaggaaggacgatcggggtaaggagctccagatggtgggccgtcagacaaactcatcctcgagggatctggcatttggatattctctggggttgattccattgaattacctcgctgatgagcggtatatcgcgtcgacttgatgcgcgagactgcgattttctcatggtcctttctggacagagtctttgagcgcgagatactttcaatccgaccagatgcatccttgttaccactggcagcggccttggcgtaccaagagcgggcttcctttatatccactggtacaaagataccaacctcatagaagtaacccagagcaaattcggctgtcggaagaccactctgggccgcgcgttgagcatatgtaaatgctagctcgtcgttcttctcaaaaataccctcatgtccacacaggaaccatttgctgattgccatctcggcttcgggctcaccctgacgggctgccagtgcattgtagtgcagagacagcgcggggttgaaatcacagcccagttgacaaagttcatatgcagcacccatcttgacctgggccttggcgaacccgtgatatgccgccttttcgatatttacacgtgccatgttcagatcgaggggtaggaagctttccgggacgctcacttgagggagctctcgagccaagagcatgccgtataccttttctccattagaatgatttcgaagatagaaatttttacaaaactcacgtatgcgccttgaggtgcgttctggtcgcatgactgcgccgccagccggatgtagtccaacccagtgttgaaatcctggtgctgtccatgctggcccaaaagaatcatcattcccaggcgctgaaagtatgttgttagtttttccactatgtccagtctatctgataacccacatagtatgaggcagaatccgcccgcgcaacaccccgctggtaatgtttgatcgccttctcaggctcacccgagctctcaaattgcattccgatgcggtactcggcacgcgcatatcccttctcagcggctcgggagtatgatcggaatgcctccttgcgatcgacggggcagccaaatttgccgaactcgagccacatgcccttgataaattccgctttggggtgacgctgctcggcaagaaagccgacaatgttcatcgcgtcgacccttagccgccgctccacctgtggggtctgcgggcgtggcggttgggtcagagagaggcggacatcgttctgcgcggcaacctcgacaaaggcgagggcatccaaggcccatgcgagttgcatctccgggtctgtggtcgacagcacggccatccgcgcgcgctctaggttcgcctctctctgttcatcggtaggcgggacgttaggtggtgggttccgcaaaaccgggaacggtgagaagtttgggtgatccatgctatcataggtcgcggattgcgcgtaggaattgggatcatgagcttcatcgtgtggggattggacggcggacgaggtgcgttcgggataggtgttggcgcgttggtatggcggttgttgttgcccgcggcgggggtcagcgcggtattccaactcagcgatattgtcctgcatgttctcgggcacttctggcatcactctagggtgaattagtactcgtattttcggcattctcggcatttgcaggatttgcaaagatcgcagagatgacagtgatgacagaaatcgcggaaatcgcagatagatgtgaattcaaattgatacctttgaggagatggggatatgacctctggcatgtagaagtcatcttgcccccctggataccatgttgcacctaggtgctgctgaccaccctgtggtggtctgttcattgtgaaattgttagagaattgtccgatcccccttgtcaatagtaaaggtcgaatagtgtcaagagagagggggaaatgaaaagaggagttgaaagtgatttaagggaaaaaggtagacccccacccccgccaggtcaaacggatttgaagaagagttattattagtatattgatagtagtattggtagtattaataggatatatccttctacttctagtaatataatagcgccgacctgtataagctccattatgtacatattgtattcttcagcctcatcgatggatgaggtacataactgtaccggcggacgtagggacttccatctggtggggctctcttgggggccgctttaaggcggatgtaagctgactaagtcgggttcacctccgaggttgggtaaatctcagtccggaggctgagcgctaagccacgtgatatatcagtgaggctgatgaatcaacatagccccacagtgtctattttggtaagaatgatttttgatgagcagagtaatccagagactttctcagcaggaagagcttgttaatgatgtcaagggttgaaggatggaggcttggagtttcataatgttaatgtgtctatagaatcataactatatcacatctcatgagccttatgtatcacaccaaactcatatcccattacagtgaatccgacatctcattcttgataaccacagcactcttctcacagggctttgggtattgatcggacgctgcttccaacccctcaagcatcactgggtctgtgtgatccaatttaggatcctcaaaaagagcggcgagctcaacttcggttttacctttcgtttctgggaacacgaaatatatgatcaaagtcttgaaaaattagtactcgagatatggaaataatggtagttgaaatttcactcacgccgaggacaagcattcccaggtagaaaatatagtagtaatatccaatgctctccagtgcaatgggattaacatattgattgacggtaagtgctgcctgcgagatagccacttgaatacttaaacccttggctcgaattgcaaacggcagaagctccgtcggatagcaataaagaagtgggttatttgccagattaaaggccgcatcgtagaaaaaaagaaatacaacgacggcaaacgaggctcccttggatccatgttgggcatacatggccgagcatatagtcaatgggatgttgacgaggatcatgccgatgaatgagatcagccagagagttcgtctgccgattcggtccgctagtaaagcccctgctagggagaacagcaggttccatatctgcaatccaccgttgataccggtttgctgaggtgtagaggtgataccaatgctggtcaagatggggctgaagtagtatgcgattactccctggccgttccagagtgtcaagagggcaacagtagccaccagggcaattcgtttcctgtttgccggcgactggtagagaatacgccagctactttgaccactcttttgggcggccgcttcagcctccaacaaggtatgtatctcttccatctcatgtatcacaagaggcgagtgcatgttgccgttgctatgatactttgcaagcagtcgttgggcttcttccgggcggtgttttgcacaaagccatcgcggactttcggggagaccgcaaagaacggacatcatgacgagaagtgcgggaattccttgaatgagcgacggtatacgccatgaccagctggtagtcatatatcctgtgccaaacgttgtccatgccgcgatgatggagcctacgtaccaaagtacattgaactatagaagtctcaggtcagcagaatgtataaagagcttggatatattagtaaggggaccttaccaaagaagatattgtgccacgcgtcgccggatgagccagttcgaagagcagcgaggggccagcaacacatgtgaagctaattccaacgccaatcaaaaaccgaccaccaataaacataccagctgattgtgcagctgtttgaattacagttcccgaaaacgtcaggcttgctccaacaaacatggctactcgtcgtccgaggtagtctgctgtgggcgaggcaatcagagcaccaacaaagcccccaacgaaaacaatagttgttatgagtccgattctagatgagtccggatttcccatatctggtgagagctgcatgattagcttctatctcgaagggaatgtagaaaggatctacggacctttgacccagggcttcatggactggaaacttcccaccacactttcatcataaccagtggtcatttgcgatataagaatggtagcctgccatgctagtagcttgcgcataccaagatctttccaccatttgtcaaagcgatgagtttcgatttcatgaacgggggcagtcattttgggaggatgaggttgatctctggggttaacacagaggagggcatctgggagagccaaggagcccattgaacttatattttgccatgatcaatggtatctgagagtgcaagcagatagttcattgaccgttgtagatatcgatgttggtcaactcgcgcgaaactcgcgcgagtttcttatctgcggaggcgcggcagtttccgccacccactccgagggacatttccggatacaattagggcttaaataaagacgcaacataccgaagtctgctttcaagatgctttcaaggcgcttttaccaatcattgacattcccgaccgctcgatcctgtacctagtttcccacccataccatgccccatccaacgactaatcaagtcaccgtggacgattccagagttcatggagactggcgagacgaattgttccaaaatgggtacgttgtggtgaaaaacgctatctcacctgatcgatgtgaatactacatcgacaagatgtttgagtggttggaaagtttccctttcgggtttgacaggaacgatcgctcaacttggaccgaacagcatttacccacgcatatcaagggcggaatgtatcatggataccgtatccagcatgagaagtttatatgggaggctcgaacgtaagtcttcaattccatatccgacgatacacagctaatcgatttgaccagagaggacggagtaatcgaagccttcgcaaagctatggggaacagacaagcttctggtctctttcgatggagtgaacttcactcttccatctggtactactctgccacaaactaaaccttggccacacattgatcaaagcccactgcgacagggtatgcagtgtgtccagggtgttctcaacttcgcaccaaatggtcctcaagatgggggtcttctcgtcgtgaagggatctacaaagcttatgccggagtttttcaagactcactcgggtgaaattggcagagaaacatggggacctagcgattggtttggctttgacgagagtgaggtgaagtggttcgaggaaagaggctgcgagattcttaaggtgaatgctgaagccggagatcttattctttgggactctcgcactatgcacttcaattgcgtcccatcatctcagaatctacgtgccgttgtttgtgagttctcttctccgacccaagtggtctctctctgactgttcatagatgcgtgctatacaccagcatcctttgcaacgcctgatgtcttgcagaaaaagagtgaattcttcgaccagcgaattggaacggtaagttatcctttctcctgtctcttctgcataaaagggcagtttattaacttcttgaatagacacattggccccatgacaatctattcactgaaactagccacgcaaaccgcccagaagaggacgaaggggacttgaccaagcgtctttatgaggaacctgttgagacggacttggtgttaaagctggcagggaaaaagccttactagatgtttttagattacttgctcgcccatggctcatatcttccagatccagatagttacattcttcctgattcctctcaatcgatcaagtattttgacatggagccgaattttcttccatatcactagtctccttcatatgtgggtataagagaagagaaaagcgacgtaataagaattttcaaatcccctctagaatgcgaagcacccgaaaacgaacaaatccaaagcacacttagcccatcatacctatattattactcgtacaataactaatatctcgctaaatgacttccagcgaaggtctcgataaggataatctcggggtattcaaggtggggatgattagaccaatcagatcaagtcccccaaagggtcatagataaagaccgccaaggctgcatttgtgtcttccacatatcctcaatgacagcaagaaagagccaaagggcacccaatgcttgctctagttgtgctaaacgtcgggtgaggtgcgacaagcaggtcccatgtggaacttgtcttgcaagaggcctagaaactacgtgtgcaagagaagttgtcaacgtcaaaggccgagttaccaggtgagtcaagcaatccagtatataactagtgctaaaacagagacagtgcaaagcagagggtgccggttctatcttattttgaactccaacaagaaaacaatcgactaaaagctgagctattcaaatcaaaactacttacacagcggaaatcgacgtcttctacatatcctagacaggaaatttccgctgaagtgctcgaaaaccagacgaatctgcaacatggaaaaagcgattatcatcagcaggtgtggaatcgaacagacatctggatgccaagcaaagactgcagtgatattttattgcatcacggctttacctggacctcgtggatccattttgctgttcatctgcagacattcgagctagagcatgagtctgcttggataaccggggtattccttgatggcgatcctctctggctagctatatattttggcttcatagcagtgagcaatatttcctgtttttcttttattgtcgaggaacctaattgatcatagatgagtctgatgtttatggataaggatgaagctagaagagccggactacctctaggtttggctacccacgcgttttcccagtcaagttaagactcctctagtctaatgcatcctagaaaatacgtctgaacttgttcagaattggtacggcgcggcactatttttcctcaacgaggcggagtttctacgaaatccgaatttcaagacagtacagtccattgccatacttctcggattggccaaaaatgttggggactttgatcttcaaccagttcttcaggcgacaggaataaggataggccagattctaggaatggatcaggagcctcccatgatatccgacgaccctgttatgcaagagatcagtcgacgagtttggtggaccttggtcatctgtgaatggctgtccataccagcgcgtccgccttgcatccaccaagcagacttcaatgtcaggctgcctctggtcctctctgatgaagagttgacgacgagattgatcaatgagccgaatatggcaaccaaaatgccacgtccagtggattatcacaatgctatgatctttttagcaaagtcgaactatcactttcaaatccaaatgagggctatcgaaaatctggatggagataatcttctggaagaccttgttctgacaacggatgaagcgctagccaatatcatctcacagttgccatctcatcttctcgagatctccggaggactagccaaagagagagaacaatatccaccctgggtactgtggcaacaaaccacattatctctctcatttttgttctatcgaatgaaggtcaaccgagtcctacaacatcgatgggcctcctcttcggatgtccttcttgcaaggtcaaaagcaatctgcttagactcggccaacacgattgtgtcgatggtcaagcaacacaaagttgtcttggcacgccatcgtccatggtgagtctcaattcttcttctgcttttctgggtcctgttcactaaatattccacttcttcctccttatgatagggcaacaacctctgccctgttttccgctgccttgacccttgcagcagaggcaaagcgtcttgactcaaatgcagcagaggagtacattgacagagttcaaacttgtttttcattttttgagtatatcaaagatcacagcgctcttgcaacgcgagtcctaagtgaattgcgggtgttttgttttcatgattctgagtcaactagtgtctagtgattacagtgatattatggatcccattgcattgaaatttataaccagagagtgatgcagtcgattctttctagatggaagactcaactatatatatgtttagagtcatttcttatcggtacgtctttggctagtaatatcaaaggtgtaaatgctttaggtccttgggtaatgggtgatatgagcgaatgggaaatcgatccgatcagcatagctcatacgtgcctctgccagctttgataaagcagacgttgcatgtgacgagactagcgtgtcacattccatggaaccttagaaccttagaatatggaaaccttggctcggcttaaactcaatgggcgaatcagggcgttcagatgataattagtgggtcagaaaggggcatgcccagttgtacccagtactacggagtactcagtaagacaaaagcggcaaggcctgaaatccggtacctgcgtacaatacttccaaggctggtctctcagatttccaagatgtacctaacctcctccgtaccggtaattttaccttcaccgttttatttttatcttttccctttcctttggctattctcccgaggtcccttctaagttcttactggctgtcatctccaatggatttccaccatccctataagccatacgatatccaactacagtttatgcaggccttgtatgcctgcctggaagatagcaaggtcgctgtctttgaatcccccactggtaagctagacctcactgtgtttattgttgattgatctaacataatgttatgcaggcactggaaaatctttaagcttaatctgtggctctttgacttggcttcgggatcacaagcgaaaggccttccaggaaagtgttgatgcaacatgtgggtcccattgtgaaagatatgactgcatagcatctatctgacattccaggcgatgacgatgagcccgagtggatgatagaacatgccaaacgggaatctaggcgtgccattaccgaaaagagacaagaactcgaagcccgactggccaagattaggcaagaggaaggacgtttgaaacaggcccaggacagtgcagaccgaccccgtaaaaagcaggtatgcatatattcaccgattggtgcaaggtcactataccaactagaaaatagcgactggacgactcagcaccggaacttgtggacgatgacgaccaatttgttctcgatgactatgatagcgacacagacaatcagaaaaggcaaaatgactctgggaattccgacggcctgtctgcaagcactctagccttgttagaacgctttcaagggaaattctcaacacaaaagaaagagaaagaggatgacggagatgatgagattaagatctttttttgctcaagaacacattctcagctgagccagtttgccggtgaattgcgacgagtcacctttccatctagtttacctagcgacctcgatccagagagcaaagatgacctttccaaactggaagagcgcgtgaaacacctgtcgctagggtccagaaagaatctgtgcatcaatcccaaagtccgggccttggagaacaacaccgcaattaacgagaagtgcttggatttacagcaagccggcgtagcagccgacaagaagtgcccctttattccctccaaggatgacgaggctctggctcttgagttcagggaccatgctttggcgactgtgaaggacatcgaagacattgcccaggttgggaaaaagctcggaatatgtccctactatgcatctcgtccagttatcaaacacagcgaggttagtttcacccgggaacagatagaacgtcgtctctaactcaaaattagatcgtcacacttccatatcccttgttgctgcaaagatcagcccgcgaagccctcaatctctccgtcaaaggtcatattgttatcatcgatgaagcccacaacctcatggatgcaatagctggcattcattcggtggctgtctccctaagtcaactgcagactgcaattgggcagctgacaacatacgcccgtaagttcaagaacagactaaaagggaagaatcggaactatgttgcgcaagtcatccgcctggtgagctcaattgcggagcatatgaagtcgatcacccagcaaaaaggaccactagaaggctcggttcaagcctcagatctcatggctggaaagggagttgaccaaatcaacccttataaactctctagatatttgcaagagagcaagctcgcccggaaagttgacggctatctcgaattttcgcaacagccaaaacctggtcgatccaaagataaaacaacaatgccggttttatttcatattcaaagctttcttcttcctcttatgaacccctcggaagagggacggcctttctttttaaannnnnnnnnnnnnnnnnnnnnnnnnnnnnnnnnnnnnnnnnnnnnnnnnnnnnnnnnnnnnnnnnnnnnnnnnnnnnnnnnnnnnnnnnntcttccttttaggacccccggggaagggggacggcttttctttcagaaaagtcaagacgatgttttgttgaaatacatgcttcttgacccgacaaaccactttcgggaaattaccgaagatgctagggccgtcattttagctggtggtaccatgtctccggtgagtatagctcatatattctaacattgtagttttctaatgctctcaacagatgtcagattatgtgactcatttgttttcatatttacccccagaacgactggggacattcagctatggccacgtcattccaaaatccaatttagtcgcgcagtcattggctcaagggctgatgggaaacgaatttgattttacttatgaggcacggaattctgaaagaatggtatgtgcaaatttctgtacttggaaaaagtttcttattgacatataaactagatcaccgatcttgggcgtacgatagcaaccctctgtcaagtcattccggacggtgtcgtcgcgttttttcccagttatgactatctcagttatgttctgagtgtttggaagaagcccattcccaacgggaacggccaaagcactctcaatctactggaacggaagaagaaggttatgtacgactcacgcgaagcagtgacatctacagatgatttactgagggagtacactgaggccgttgagtcgggatccggggctttacttctctctatcgtgggcggcaagttgtcagaaggcattaatttctccgacaagctagggcgcggcgtctttatcatcggcctaccatttcccaatatccgcagcgctgtctggcaggccaaaatccagtacctcgaggaaaagacctacaaacaggcttctgggtccgagtcggaaaggaaagcaacgggcaaggcagcgggcagggaattctacgagaattcgtgcatgcgagcagtgaaccagtgcattggtcgagccatcaggcatgtaaacgactacgctgctattatcatgattgaccgccggtatgagtcgccgcggatccagcaaaaactgcctggttggattagaggaagcttggtcccagcacctcccacgcgggcggctcaaatgactgtgcaaagactttcaaaattcttcaccgaaaaaaggcgatagtggaatatgcactgtaatcgaatcattacaaataatgatacagcatcataatcttcgcatcaaatccgtgctcgtattggagatgtgccgtaaccctacattgtaaaagaccggcagaatgagaaggcggtgtatgtaatccgtgacataagttctgacaaagccagggctagggttccacgatcacgggacaagcgaatttgttagcgcacactctaagcctggatttcaacatcctgtagacggaacgatcccttcaacgccaaacatcaacggtcttgtcgaaacacccccgccgacaagatgcctacccgtttctctaacacccggaagcagtgagtcgacaccctttcctgtgccgtctgaatcgaattcttttctcgtcgatcgcgaccagaagaaccaaattcgtcataccccagtcgcaatatcacatcaacatatcactaacctgtctttctctcgcagccgcggccatgtgtctgccggttacggtcgtgtcggcaagcaccgcaagtcccccggtggtcgcggtatggccggtggtcaacaccaccaccgtaccaacatcgacaagttccaccctggttacttcggtaaggttggtatgcgttacttccacaagaccaaccagcaattctggaagcccactatcaacgtcgataaggtacgttacatctacattttgcgagtctattcgagatgaaggagaagaagttgtggattggtctggagttggagcaccggtgcgcaaatggcgacaatatgcagaagagaaaggaggccaatcgacaactattcgaaggatttgcggaattcgattgaaatggacaattatcgctgaccgcgactttcttctacagctctggtccctcgttcccgccgagcagcgtgacgcctacctgagcggccagaagaccgatgtcgcccccgtcatcgacctcctgcccctcggctactccaaggttcttggaaagggccgtctcccccagatccccgtcgtcgtccgtgcccgctacgtcagccgtgacgccgaggagaagatcaaggccgccggtggtgttgttgagctcgtcgcataagcgttgattcgtcgagatatttctggagaaggcgggtgaataggggcaatttgaagccctagctgtgttcgttcgccagcatggaggacgatcggaactcaaaatgagatctgcccgaaccgaaactaagtcggttcaagcggtcgaaaataaaaagggtttttttgtatgcaatcagcatagcatatggcctccgaatgcccttacgatttcatcagtgtgttaaacaaataccataaggaggatttttttcaaatgtttatgatgactcccgggcagagtgttggttctgaattattgcgccacgctcatgtaggatgaccgaggctgtcttggggcatgaaaggcttcgaatcccgaacaggttcgctgttaaagctccatcgtcgtagatttgtctaccaatctgtccgattacaattgcagaacctacgccagtgacaggtcatgtctattcacatctgatctcattctatgttgtatacatcgaggtattcaccatggcctagtgctctcagatcttcgactctcgcaccgaacctcgtcgacccccctgatcgggacccacggccaacgtctcactgataaaccgaacagcctcgtcagccatcttagcagtgacctcatgggctgccgattcgtcaatgatatcttcaaagtgcaccccgccatcaccgaaccacccatcggatgagatactctgcttgagccagttgaggaacagttctccacggtgatagggaacaagcttgtccttggcgccagacagattcaaaatacgcttgccagccaaggcatgagtcaaaatcggccgcagcaccttctgctcgctctctgaaggctgaggcaacggaccttcgcgcaaaggaccagtcaatggcccgcaatccacatgcttcagcatcatactggcaggatcatatcggctgacggtctctaggaaagaagtcggcaaggcttccgagccaaggacgtcggcgccaggtggatcactcttagtccatgatggcagcttcgacagccgtgcgcggtctgccatcagattgatatagtccgggcagccgatgatgacaactccggcggtgactcgaggctcgtgcagtagacagctccatgctgcgtgtcctcccagcgagactcctagaactagattctgggtgatcttgtgctcgccgctggggaatatgtaggagggaaggtagtccatgagcactgatgtatctcttgcagtgccctctagttataattagaataccatattcttattttacacatgcattcactcacggaagatggagaacatatcctgggcatgtctggggttcccctttttccaagattcatttccgagagggtcgaccagccgggtaccatggtttctctggtcgaacgagacggcaatcaggcccttggccgtaggggtgtcctggtttctcgtgttccagtcggtaatggcggaattggcaatgctagtcatgcgctcttgggtggctaatctggggtgaagaagccagagacatgcgacctccgaggcctctttgcggagctcttccagtccgaagaccgttactgagataccagcaattgtatagaccctttcagagatggcggctgccacgctgcctacatcactcacggatttcaatggatcagtcattgttgaacagagatatgaaagatgttgaagagaggtgggctgaatagcggggagataactcgggtatactacgaaaagccgaggccgttggtttagagcgcatgtttccgagactacgaggatttgttatgttttagatgttttctagttatgttgtctattgcctatacctcgtctcctttattgcaagttgatcctctcctttttgtatatttgattccacagtgttactccaaggtccccaactaaagccacatatacggccacttttgtttgctattaaaggacaaacccctttgaattcagtcagtctaattcaatattcccattttatacgcttcatatgtcctattatataccaaatactccatatatactgttgtagagcccatgtccgttgatcataacacgcctcgacgtccaatgccccttttccagaccgcccactcttctccagtcggagagacagctgggcactccactgtaaaccaattatcgatgctcctttaaatgtcaacacacgttctttatcctggaatttcttgtttatttcttgttcttttaatatgatgactacctagtcagtttcgacagtgtatgtacgtgaacgtggtagaatccctgtgaactgcaactgataatcgccttgcattagctccaatcatgtcggcctcgtcagttcacaaggacgtggaaactggctcactgaggatcgacacaaagaagcaagagccccctttggcttcaaacaaatcaaaactggcaagcccgctgccttctcccaccgaatccaagaaaccagcatcgatcaagcaggtccaacccacgacggacggccatgaaacagatgcaacaataggcgacaaggaaaatacacatccatcatccttgaaccagggctcaccaagaggaaggccatccctgggcactcaaccgccaaaccagtcagctgaggaccaacaatggcgctatcaacgccagtcgtctaaacccagaatgtctcctccatcccgtcccccaagtgtacatttcagagatacagacaccgaggctcctgacgcgtcccattcccggccgccatcgcgacccgtctctcgaccagcctcccaacacggcgacgatgatgagcagggtcccaaaggaaaacagtcgttgttcggcaaactcaagtcactcgctaatgcacccaaccttgcaccacactcacgatctgccagcggcgcgagtacggacttccgcccaggtccaagcgatatagctaccccggggtcggaaaggggagaattccgcttcccagaggccctggaagaagagggtagcgagatcgatgccgacgcggaagagagtggtggcgagcaacccgatcctcgtgaaaagagaaaactgcaacgccggcgaaagcaacgggaggaagaggctggccccaacaccgcccctacaacacctaaaacagcgcgcagaccatcattccacttctcatcctccttcgctcctttcgagaattatcgtactaatctgttccctcgaagagcaagcactacagacttcacgcctcaacaacgcgaaggtgtttcggaagatgaaggtcgtcaaaggctcagccgacggatgaggagtcgcccatgggcaaatactcgggttggcagctataatgaccacccagataccaatccggatgaacaacgcccgagcaacttgaggcgatttaccgggcttgctggaccatctggaaacgatgaaagcctaacggcgagctggagacgccatcgagccgagcgaggcaccagtgccagtgctcaacgatggaaacaaatcaaagcaggtctgaaacttattgggcagcgacgaaagccagagaatacagtggacaataaaaaatccgcagagttacttgctgaactcgcttcggccgtgcctgctgcgcttatactggccagcgcattccaacgagatgagcacggcagtagaaagatcccgattcttttggagcaattgaaggttcgtgttacggacagccggattgattcccactccggtgatcgtcatctggtcttccgaatcgaaatggagtatggaagtggcatgactcgcatgaaatggatcatcttccgcacgctaagagactttgccaatctgcatctcaagtataagcttcatctgggaactcagaagtacattcaactacgcacgagtgagaacagcccgagtctcccccgattccctagaagtgccttcccctacatgcgaggtgtgcgaggccttgaaagtgaatttgaggatgaagatgaagagggtggttatgagactggcgccgagggaatgagtggaacggagaggcctccgatgaagaaaaagcagaatcaacaagcacaccagcgtcgagtctctggtccgcttcctcgcagaaagtccagcctcaccaatcaagaaggagacacagccgcgggaccttcgtccactaacgaaggtgtctcgggagtcaggaaagaaacataccccgagaagcagcgaaagaagcttgagctctatctgcaaaagatgattaggttcctaatctttagggctgatagtaatcgcctgtgcaaatttttggaactgtccgctctcggtgtccggctggccgcagaaggcagttaccacggcaaagaaggattcttaataatccagtcctccaagggtctcgatttccgaaaggcgctcaccccggctctagtcaagaagcgccattcgcccaaatggtttttggtcaggcacagctatgtagtctgcgtggactcccccgaggagatgaatatttatgatgtcttcttggtggatgcctggttcaaggttcagacaccgaagcttagtcttcgcaagcaaaatccaagggatattgccaagtctgcaaagcagtctgcgagacaccctcagcaccacactctccggcttgagaactccgaacgcaagctcaaactgctggcccggaatgagcgtcaactccaacagtttgaagactcgatccgcttcatgagtgccaatactccgtggatgcagcccaaccgctttgacagtttcgcacctgtgcgacaaaactgctttgcacagtggctggttgatgcaagagatcacatgtgggttgtctcacgagcgatcaaccaggcaaaggatgtcatttatatccatgactggtggctgagtccagagctttatatgcgtcggcctgctgccatcagccagaaatggcgattggaccgtctcctgcaacagaaagctcgggagggcgtcaaagtcttcgtgatcatgtatcgtaatatcaactccgctatccccattgactcggagtattccaagttctctctccttgatctccaccccaacatcttcgttcagcgatcaccaaatcagttccgacaaaacactttcttctgggctcatcacgagaagctttgtcttattgaccacaccatcgcatttgttggaggtattgatctgtgctttgggcgatgggatactcctcaacatctgttgaccgatgacaagcctaccggctttgaaaccactgatggtcccaaagatgcagatcaatgtcaactctggccgggcaaggactactccaatcctagaattcaagatttctatgacctggataagccgtatgaggagatgtatgatcgcaatgttgtaccccggatgccgtggcatgacatttctatgcatgtcgtgggccagcctgctcgagatcttactcgtcatttcgtgcaacgctggaattacattcttcgccagcgaaagcccacgcggccgacgcccttcctcttgccgccacccgatttcaatccagcagatttggaagccttgggtcttgatggaacttgcgaagtacaaattctccgttctagcagtatgtggtcgacaggaactcccgatgtcgttgagcacagcatcatgaacgcctatgtcaagttgattgaagaatccgagcatttcgtctacatcgagaatcagttcttcatcagcacctgtgagattgagggccgaaaaatcgagaaccttattggagatgccctagttgaacgtattgtccgagctgccaaaaatgaggaagcctggcgtgccgtcattgtcatcccactgatgccaggattccagaacaccgtggacagtgaaggtggaaccagtgttcgccttatcatgcagtgtcaataccgcagtatctgccgtggagagacatccatcttcggccgtcttcgtgctcttggaattgagccagaggattatatccaattctacagtctgcgaacttggggcaagattggaccgcaaaaggcactggtgaccgagcaactctatattcacgctaaatgcatggttgttgacgaccgtgctgctatcattggatcggcaaacatcaacgaacgatccatgttaggttcgcgtgattcagaggttgcctctgtagtgcgggataccgatatgatgatgtcgagcatgaatggcaagccataccttgttggtagattcccacatactttgcgtatgcgtctgatgagagaacatctcggaattgacgtcgacgaactcatggaacatgactttgctactgaagaagagctacggaagatccaggtcgctgaggggagtgagcacccagttgacaaccaagaacgaagaaattcggcgtcctcggccgtcgaacgacaagatgagagggatatggtcgaacgtcggcatcgtgtccaggatgagtttctttctcgctccgaggaaatgtatagcttcaaccacgatgtagattgggagcagggttgtaaccctaacctcaaatcgaaccgcaagctcactgccgaccctcgcgtcactgaaaatcctgatcacagaaaagacgtggaaggggatggcgccgatcatctgtcagctgctgctcaggctggattaacagtcggtcgtgattcggagatggagcccaatggaagagaagccctgctttcagccatcgctcctgaggggaagggcactgttgagcgaccgagatcatcgcagcaaaagccaccttcaacaccctccaccccgaaggaccgcagacctgggtcatcgagtgagaccaatccaatccccgagaccaatgcgactacaccgtcacaaggctatggacttaatggagcgtcgagccgcgagtccgagactagcggtaccggttcgaacacggctaaagaagaaaatgaacactccaaacaccaccatccgtctgttccggatcccaagcgtatcttcatcgacaacgactgcatgagggacccgatcatcgatggcttctacctggacacatggcaagctgtggccgagaagaacactaaaatttaccgatctgttttccgctgcatgcccgatagcgaggtgaagaactggaaggaatacaaggagtatgccacctatggcgagcgctttgcagagatgcagagccaacagggcaacaagccagcccaacctcaacaacctcaacaaaaacaaaatggctcttctccagccggtcctacggttagctctccgatgtcgatcgcttctcagatgtctttcatcactccaaaggccgaaggatcgcaggcagacccgaagagcccccagacaattaacgagaaggtcgtaactgggaatgacgctggtcgtccacagtctgagcagttagcgaagcaggagacgttatcatctatcgatgagaaggccgcactcaagacggtttcggatccgaacctgttggccagtgttccgaacgggaacgggaccagcgacgacaatagtttcgtcgtcggtgatgatatcgagaaggcacgaacaacctcgcctcatgtcgattactctgaagccgtgaacctgaatctgaactcgagccattctcggagacgaagacgcagagctacaacaattggctcaaagcgtgacccccatggcacagatgagtatttggacaagggccgtgcagaggacctccttaaccatactcaaggccatctcatcatgtggccttatgactggtatgtctcaacaacgcttccattggatctcaggatatccactgaccaattctatttacaggctcgagaaagaggagcaaggtggaaactggctctatgctttggatcagatttctcctctggagatctagtaagttgtctctccttgttgctttccgaacggaatattaacggatatatagcaactaatctctaattgcacttgacggcgtcttgttcgtgcttgtctacttggtgtctgtgttggaattcgcgagcgccgctatagcgattgatgcattttcatcttcttgggccttcttgggtctttgcctagtcatccttcggagttttcatgcatcacggcgttctctatgttacccctacctaagtagcgcaataagtaatcatcccgtttcgaatacggagatagtatattatcccgccaaggtcctgtgtggtgtgtaatagacgtactatttcaacggttactgatgaaacggcttgtactttagtagaataatgctaaacagcagaagaaaattgaattcatgattatatatctatgaagaagtaggctcttccgcaacgtagtgcaggtaagctcccagcagcttggttccctcaatgtagtttctcttgtcaagcttctcgttgacagagtgggcagcatcggtcgagcttcccatggggagaagcaaaacgttcttgccggtagcttgctcgaaggtcaatgtgacagggatactatcaatggttagctgcgggactatttcatttatgggaaaagaagaatctcaccttccaccctcgcgagtcatatcaggctcgactccgaagacctgctgaacagccttgctggcagccgagaagttccagtgcttggggctggcgacccaccacttgccgtcgtgctgcagccaaacatccaaagtgttcttggtgttcagcttggcgaactcggccttcacatagtcgatgaccagcttggtcacatcttcgctctccatattgggcacggtacgaatagagaatttaccaatcaccttggcaggaatgacggtcttagcaccgggggccgagtaagcaccctcgataccgtggatggacagagagggataacgccatctggccatcagggtacgctccttggtggggtggatacctgtctcagcacccaacgactcgtggaggttgtccatagtgtagctgatctttccatagagagtcttctcctcctcagtcaagggagccaccagatccatgatacccggaatcaagatgttaccctgggcatcaaccagcttggacagaacgttgaccagatcagtcatgggctcgtgggcagaaccgccaaagacaccgctgtgcagatcttgagcggggcccgaaatgctgatggagtagtagttgcagccacgcagaccataggtgagacagggcttctcggtgccgagccagtagttgtcagagatacaaacggcatccgtgtccttgaagtacttcttactctcgtccttgatgaagtcatccaggccctcggatccatactcctccattccctcgaagcagcacagcaagttgacggggaattcgatgccagccttgcggtgggcatcgatgacgttaagccaacccaaaacgggacccttgtcatcggtagagccacggccgtacatccgatccttctcgtcaatagtcaactcaaagggctcggtagcccagccgtcttccttcagagccggttgcacatcgtagtgtccgtagaccagaatagttcgcttgttcttatcgttaccgtatctcgcaaccaccacgggtggcagctcgaggtgctctttgccaggctgcttgcccaatggtcgttgctcaacctcggctccaagagctgtgagctcatcggcaaggaattgacccatctagaaaagattagaccctggatttggatgtctgctgggaaactcacgcggaacacatccggtcggttctcatcttgcgccgagatcgatgggatcgcaaccgccttccgtagaccttgaccaaaaatcagcgaggaccttgcgagaaaccagtattacctacgatcgatgaaatcgttggacgaggcgtcgacccttgtgactgttagttgacgtctctctttcaaagattagcatacttactgcttgaaaaagggctctagctggggagccattttggaatcactgatatagccgtagaagaagcggcgagaggagagaggcgaacgaacagctggagaaaatcgagaagaaaaaggagcgagtttgaatgaaacgcgacggaggggaaagaggggcattgccgtctttgccctttggtaaccggagagagtctagaggtgacttcttatcacgtaattttctattggccctatcacagcgatgtggtcagcggacgggttctaggcgactgagacatggactttggcatattttaggcaaaagatacagtcgagacattagaattcccccgttgatccttatttctatatagctcttgataaagtagaagatttggtatggaatacataaacaatgctacaaataagctagaatacatggatttttctttacaaagccacccccccccccgaagtatcatgctgccactatgcatctcgtccccaggcctcgcgccgcagttgacggtcctctctggccatgcggcgcttgggtccccatcgcgattgcacggcctccaagatccgggcctggatctctctcttctctgggcttgcctggcaaaccatggcaataaaaacgggcgagcattcaaaccgtttggcaagcttgtttcggctccaggtcatgggatcgttcatgcggagtttgcggatttcttcaatatccgaaggggtgaggtggtatttcctttcgggcacggacttgtagacaccgggaagatcgtcggcattgggggtcgcagtggaagagaggattgatgctttccgaacatcatcggctggcaggaatttggatggggtgtggtaggcatttggagcactcgatggcgggttgtggataatgtgatcgtgacccaggttagacgggtcaaatgaggagtctggcttcacacgtagtcgctgcttggttcgtcggtatgaagattggtttcgtcggaagcctaaagccagcgaatccgacaaggagggaataaggaatggcaatgtgagaaatggccgcttcgtcgcggcaatgaaggtcgccattgcttctggtcaatgggggggattgatcagaaactaaaatgatggaagagaaggggttagtaagtctgcatagatagtggttgcaatgattcaaccaacctaaacggaagagtgaatttgggggtggaaggactggacgtgttggcgtctcttgcgctcgaacccgaacttttcccctggtctcgtgaccctgatctgggtgtatttgcaataccgtattgaaatatacgtatgtatccggtacctgataggcctttgttgtgagtgcctttccaaagtaccgaatacaacttatctccgtccttacgtactgccccaagtaggtaataatcctccccgtttgggcccgttggggcttgtcacctggtctactccagttacgatgtctcacagatgtcatcaagacttttgctaactcccatatacccatatactctactttattgattatgtccagattttgttagttcatcttatcgaaatgtcggatatcgaaatgtcgagatttgcagcccagacagagaagccaaacgaggctgaagcgagtacacgagcgaagcccactgctctcacatgggacaatcaaagcgacaaaggttgcatatcgcctgtgaggtcattcgaaggcctgcgaacaccaaatcatgattcgcccaagtacatgcgacacccctcgtcgcctgaaagctcatcctatctgccgtctcgtatacattcccccgcctctcagatattcgaacgagacgtggaagatatagtgccagcgcaggcgtcgccttcgatccctacgcatattcgaaccgataactatattccaccggtcctagaagcatcctcggccgcgatcacagatgaccacctcgatccagattcggtcgagattgtcacacatagcctacatcagccagcaggtggtccatcgggagagcagtcaatgtcgtcttccagcattgatcatctcttgggccagctcgatggagatgaactcacgtccagttatggcgcactggacacggcggacgtacgtcggctgagctttatttcctttgccgacgttgtcaacgccgagcatgcagaaacaaatgaagctcatgctggcttaatatctcgggggcgcctagcagatttcaatcaatctccgtctccattgcgctctccatcttcttcgcgtggactcggcacttcgccgccaacaagccgtgcgacttccttcagagggcttgatatgtctcctactcggttccctacttctagtgttgcccaaagcccaatctcgtccagttttgggggcgacctcaatatagagaccatgcgacaggctttgagaaaaaccgctagtggagacctgggcgtcacaagccgggccgtgagtaccataggggatgacctgctggatcgtaccatttagcagattaaagtgcttttgtttggcgtttggacagtgaaaggctcggagcaggatctctttttttttcatggtacagtgtgataatctacggtctgctttatatgatatataccgcaatctacggatctggatattccagaacctgaaaagtccaagttcttgtgtaatgcacaggccaactttgattgaattggggtagactatacacttgcctgcccaactttttgcactgcgtccaaggcccgttgtacccgggcgcgcaggtcggctgcatcttctaatccaacactgattctcactagatccggatcgacatcgaaggttctcgcctgatgcatgttagtcatggcctggtcaacattcgcgtggtgtacttacccaatctaattcgccgtaatgggccaggaggacgtatggagagctgaaaagttagtaaaacccaagacagagggcttgcgtactcacctcaatgtaaaattggtcccaaggctgggtcccttgaaaacctcgatggtgtcaaaaaaggcaatcgcctcggctgtggtgtggaatgtcacagagaagagaccaccataaccaccattggcattgcggagactatcatatagtggtttcgaggggctgtatttcgggtagtaaacatctttcactgtgaaattgtcagtatagctctcactccaggtaaatgcatgcttacctaggggggactccttcagcatcgctgtaatgtcctcagtggtagcattgatctgttcaatgcgagcaataaaatcacggctgtttctctccaggaacacgacatcctcagcccagtagatatcttcgtagtcctggttatatgtctccttgatggccgcataatacggcgcttgagggttgagcacagcacttcctcccatgacgttgctatctccgctgaaaatcttggtcaagctgctgacaacgatgtcggccaagtgcaaaacgttgatgtttataaagttgctgatagtttcgtcgaccaccaccgcaaagccatattggtctgccaaagcgcgaatccgtttgaggtccggtgttttgagaagagggttacctggtacttcggtgaaaagcccaaggaaacgctcaccagccttcagtcgagattccagatcatccagatcttccgacgagccgtgaccatagaagacgcagcctggtccccacttttggagaatcttcaatgtatccgtgtaagggaacccgaaacaaattgagggcaattcgcctctagtagccagtaaggtctgatgagcgttgaagatagcgctcatacccgcagggtaaagatagacatcctcctcggagataccggcgactcggccttctgatgaagctgtctttaaggcttctggcagttcagcattggcagtcaagacacccgcaatacgtttgcgaacagccagcttggcctggttggcgagagaagtgctcagatttcggccaaaccgctcctcaataaactgaccatagtctcggccgccgtcttcggtgtttgattcgggaggagattctccaacagagccctttctccctttactgataccttggtatctgcggggtcccttacaaggacgctgggagactgactccgcagtcgcaaggcccttgtcttccaccaagaacccgtcctccaatgctccaaggcagaactcacctcgtcgactggagatgccattgcccgagtgttgccatacctgcttggtaatggaggcgtattcttttgggtaaatgacacacgacaaggaagatgtcactgtcgatccggattcggtatgcggggatgggacgaagttgacaatccgtactttgtatgcctgatctgcagggattttgctaagcaaaaaagagtgacagatgcgcgctgacttgactgaggcgaatagggttgcagattcgaggttggggtcaccgactcggcgaacaatctcctgcgcgagcttttgaataataggatggacgaagaatcggggataaccgcattgcatcttgtctatcacccaagcttctccttcttcgtagccgatgctttccctccatgatggaagcgatacactgacggccttgtaaatgttagaagagtcatggaggggttgcggggagttagccatacatggtcagtgtttggaggcacaggtcctcccaaagcctgcaacattttcaattgaaaatagaaaccaggtggaatttatgatctattgcagataattgctctagaataatagagagagggaaaaaaaaagactgtaaggtaaatgatgcgattcctccactcagcgacttcggcgatgctccggtacctgataaattacgagtgagtcagccgtacggtaactatttaccagatacaataccgttatcgccaaaaaaaaatctcgagggcctctactgacaactgctacgctcacgaaatgtcggaccacacatccaagcgcagaaagctcagtccttccccggagaatgctgttactagcgcttcgacgaaaaagacatcgaaagtgaccgagaagcgaaacccggctcgaggcaaagatgagcgctccgcagagcttgcaatggccagcggcttttacaagtccagtttcttcaagctgcaaatggacgagctgctggcgggattgagacctaactacagcaagcaagtctcaaaggttcaggatacactgcagcagatcaaaaccgctattgaaggcctgcccgaaaagtctccacaatctgtccccgatgccgagaaggagctacgtgcttctggtctggtggtcccatggcctgagcctcgaccgagcaaggatgtcaagtacagtatggcatacgcaaagccagcgaacatcaacgtggtaggtagctttgcgctgaagataggcgctcgcaatttggcgtcgcgcccaattgatctggcaatcactatgccaagttcgctcttccaggagaaggactatgtcaacttcagatacttccacaagcgggcctactatatcgcgtgtgtggccgctggggttcaagaaaccgcgaacaccctcgggtttgatatcaaatttggtcctcaggatggagacagtctccgacctattatcttgttggaaccacgtcaagccgaatcttccaggcctacaatccggattctgaccgcaatcgatcctacgttgttcccaatcacaaggacgctcccactcaaaagcaatatccgacaggcctccaataactcggagatcggcgaaccgacctcgtattacaatgccagcctccggtccgatgccacagtttctctctatcacaagtctgtttactcggcctccaagaagtgcgattctttcagcgacgcatgcattcttggccgcacttggctgcaacaaagaggcttccatacccccttccagaatggaggctttggtggtttcgaatggactgtactcctgtctttgctgtttgagggcggtggtccaactggacaaccggtcctgctaccatcatacagctgctatcaaattttcaaagccactattcagtttttggccggcagggatttaaccactcctctattcttcggccatgaggtcccagttccttccggagtacctgttgtctttgatggccgcagagggttgaacatactttacaaaatgacgccttggtcatacacaacactgcgtcacgaagccgccatcaccctaaaaatgctcaacgagtcacgagaggacaactttgataaggttttcattctcaaggttgacgagccagtcctcagatttgaccgcttgatctcattccccaagtcattcaatggagacacactccgcgctcttcacgaacagaatgctttgtataatgttctttcccgggctctgggagacagagtcaaacttgtctctattgtgggccacgccattgattcgtggtcggtcaaatccaagcagcccaaacggtcgagtcagggtgtgtccgtgggactgttgctgaacgccgaaaacgtcggacgaattgtcgaccacggccctgctgcagaagaaaaagaagagtctgcttccttccaggctttctggggtgaaaaatcggagcttcgacgattcaaggatggcagcatcctagagagtcttgtgtggtctgatgagtcggagacgtctatcatctatcagattttggagtatatcctccaacggcacttcaaaatcaccaccgatgaatttgcatttgttggtgatgaatatgacgagctcctcaaagagcatggcgatggcattctggcatactccagccctgctttccagtcaatcgacaatgccttcaaggatctcgagaaatccattcgcggtatggacgaggtgccactggaggtacgtcatttggccccggccagttcgcttcttcgttatacctccctcagaccaacgggacccacggacgttgttcttcagtttgaaagctcctcgcgttggcctgatgactttgctgctatccaaatgaccaaggttgcattccttttgaagattggagactctctggaatcttcaggtgcagcctcatcttgccgtgtgggcctcgaaaatgaatcgagcaaggtgatcaacaatgcttatttggaaattccccattcctctggtgtgttgttccgattgagaattcaccacgaacgtgaacaaatcctactcgagcgcaatctcaaggaccgaaatctgagtccccgggagcgagaagaggccgcctatgctctcttcgcctacaagaaaacctttgtccagactccgcgcttgacacaggcactccgaagcctctgcacgcgctttccactgttgtcgcccaccattcgtcttaccaaacaatggtttaattctcacctgttcactgcccaggtcagcgaagagttggttgaattgctggtaattcgcaccttcacccaacctaacccttgggaatgtccctcgtctgtcatgaccggattcctgagaactctccactccctctctcggtgggactggcagcaggagccgttcattgttgacctgggaggtgatctggccccacaagtgacggcaaatatccgcactcgcttcacagcttggcgcagcatcgaccctgcgatgaacactctggctcttttcgtcgcctctgacctcgacaccgaaggagtgacctggacccaatatgagatgccctccaaggttgtggctgctcgaatgtccagcctgaccaaagcagcagtaagcctgttacggagcaaaacccatgatatggaagtttccgagctttttgatacctcgcttgctccctatgactttgtcatccatcttcgcccaaagctgtttagccgttcctcgacacccaaattcaagaacttggccgaaccccgtgccggaatgatgcagaccatcaagtcgtttgtctgtgatgtgcaagcctgttacggccagagcattctgctcttccacggagacgatcgttgtgcagtgattgctggcctttggaacccgcagactctgaagtcgcgaacctggaatctgaagacggcgtactcaactgccccaggtgatactgagggtgaggttgtaatcaaccagactgctattctgaacgagatcgcgcggctgggcaatgggctcatcgaaaacattaaacttcattcagaataggtcttgtcttgattcaattggtgtacattaccctacaaaatagttcgagcatatgtagcattctaacgaattccgtttttcttcaacttatgaactcttagcctcgagtatcatagtagatgatcctctaaataccctaatactcttagtgctagacattcccagacatcatcttgatatcgatgcctaaggtgtcaacaattgataacattgtgcaaccatcagcctttcatcttctctcatcaacacaacaatggccaatataacacggggccagcgagcgctccacgctcaattaagatcgtggaatcactcttgtatccaccctcgcccccaattccagttgctgcccatccgcgcgcaatcccagctcttctcaacctcctccagtcagcaatctcgccgaccctccccgtcacctcctaccacaaccaccgtctcaactccctccaaatctgaaatcaatgccccaatcagcacccaccccgccacgctcacaaccccatcccccctaagcccctccgcaggcgcagcggacaaattaaaacgccttgtcggaatcggtcgtgcgtacctcaccttctacaaaacaggcctgaagaatgtctaccacaattaccgtgcctcgctccctctacggagaaaaataggtctacccgcctatatccctatatccccacacaacatccaccaccgtagcgcgccatcaataacagaagaatccaagctcggccgcgcgcagttccagctcgtccgccgctcagcccgcgatgtccgccgcatgatccccttcacgatgatcctgatcgtctgcggggaactcacgccgcttatcgttccgtttttcggctctgctattacgcccgcgacgtgtcgtgtgccctcgcaggtggagaaggagcgcggtgttgctacggtacgcaaactcgcggcgctagatgcgtttgttgcggagaataaggatcgctcggtgcatttgctcaaggcgggcagtgcggagcagttggctttgcttgctaagtgttttgcggatcctgtctgggtcgccggtgcgagctctgcggatgtgttgcgtgcttgtgctgtttttggtctggttaagcatcataataggactgcgggtgaggcgcttgctggtttgatctaccggcctcggctggcgaagcatgtcgagtacctggctaatgatgatgggatgattcgtggtggaggggtttcggctatgaatgctactgaggtgcggattgccgttgaggagcgtggtggtgtggacgtcacttctggtgttcaggaccggaaacgcgtggagttggagaggcgctggttggagcagtggctggctgttcgtggaaaaagtcccaaggccaagaagctgtagtttcttggactgatacactggaggtcctttctcgggggttttttgtaatatatatatccaacatttcgactcataaaagggctgtttttcgtccagctttgctatcattactagccgcaatactagctagcctcggagtgcaatctcaaactgtatataagaagacatgtacggaaggaaaatccaaatgtccaagcgctcaaaagtagcatgtgtcaatttcgacagtcaaataaatggaagggtatcaagaaaccagcctttctgatggagaaggcaatcaattgaaaaaaaaaaaccccaagtttatatactcaccatcagtccactgtaattgaagaagccgcagcctgcgcctgcgcctggctacggacttgcttcgcccaccgcagaccacagctattgcaaagatcccggtttccactcggaccacgccgccactcgggggtgttctttgtgttgcacatggcgcaaaacttctcgatcgcattagcgccttgcttgcgcttacgcttcctgcggcgagccagcagacgttgcagttcatcggccagagtgcggttctgcttctctagctcgcgcagctcgatttgccagctcgatccgcgcgtgggattgagctctgtaaagaaggttgctgggtcggtagagggagaaatgctgcggttgccactgggcagaccgttgaggccgatcaggttcgctagatcgggcatgcgttgaccaagggcaccgtactgctggggcggggtggggttatcgacggtaagtgttgtgttgcgtgcagtaccggtaagcgtagcgagactgttgtcttcggcggctgagatggcggtggcggatggaggagaggctcgagcgaatcgtatctgggcgacgaggaaggtcggttttatccccttcggtgtatcgccggtgtacaatgtggtatgtgctgaaagggcatggcctttcttatgccatattttgtgtttgaatgagggtggttcattcgtttccttgtcgctacctgtaacggtggataggccagctccttgtccaccacaggcagcctccagggcttgtgtgatcgtggcattgccaccagtctcaggctccataatctcttgtatgcctttaccaatcaaatcgtcaggcgagcggccgagcaccggcttcaccttggtagtaacgaacagaatcacaccagacaaagaaatcttggcccaaatgtcattctcggccagcgcggcggatgagcccaggcgggcaatctgatccaaggtgtagacgggtcgtgggcggccggtcatgacaaggtacctccggccctgattcggatcgatatgccaggcgccgtgactctcgaaccacatatatccttggtgcttttgtctgatacgatacacgacactcactggagcggttgtcgtgctccctcgcaagtcacgtattacaggaccaatatcactgggatggcagatggcggacagggtcttgccgatcagttcggccggatcgtactccagaatcttgtggcaagagggcgacagatacagaaattcaccgttgaatgaaagcacatggatcacatcatcggtattctcaaccagaatgcggtccaggtagtgccggttgacatcattgccagctgcacccatggcgttgaggatgttagtcacttcgtcatggccatatcgcaacacgaggtctggtcgtgaggagcgcgcatcttgtggtggaactatatactgtggcagatgatcgcgctggtagtttatggtataattaccatctatccaatgttagtgagggcactcgccacgaggaatgcaaagcataccaggattccttcccctcacagcatcgggtttttcaaccagatcgacctgaaacccgacataataccgataaacatccgagtcccactggatggggatcatcgtgatgagattcatgaagggttgtccacccttgcggtagttaattatactggcctggatctcattgcgatcgtcgatggttgaccgcagccgatagacggtctgtccatcgacaaaggtccgcttggcaccagagttgattatgccgtcgggtgcttggagaaatcgacagttccggccaacgatttcatctttagtatagccggtcagtcgttcaaaggcctctgatacatagacgattggatgatcctcgaccaagatgtcacacatcacaaaggcacatgagagatcgaccgcgccaatgttgattttagggttgggtcgcatagccacacggccctgaataaggttaatatatcgtcggatactctccatggagatggaagacttaccaacgctcccagcacgtcaaagccagtcgttgaataaatgccggtatgttcagtcttgccaatatcgggctttgctagccccggcgcgaaatcctctggttgcacggtcccacgtcagtcataccatgggacggagctaagagggagttaccagacacagacacaactcacctttagtaacaacgggtttcttgggctggatagccaccggttgcgatggacggtacggctggccaacaggcaggcggcgctctggaggttgtcgctgcgcccgctgcacctgcaccggcgcctgcgcctgtgaccagtcgctcgtgcgacccgagaagtcggagtcctcgaaatttgctgttgagtcggtgcttgtatcatatcgttccttgggcgctggccgagcgggctcggaatattggggtagcggcataggttgtgggaaaggcggatatgcagactgaaactgtgaatgatccatctgcggaggcaaccccatgatagccgggtacgtggctgggatatcgtaggaataggcattggtagcattcgtattcattggcattgaaatacccgaggtcggaatcccgtcgtatgtgagcatggcattagacctcggtccctccaggtccgacggctgtgagcgtgcgaagttctggagcgggagatccgcatcctgggatagcatggcactgaaggcataattattctgattggaaaaggttgtatatggcggattggtgggttgtgagggaacctgatgttcgtcatcatagtccaagttgaagctgttcatgttggttaaaatatctgtggcccagaccgagttccatcgccccgcaggatgacaccctgggcaaaagtgagaattgccgtcgaaatatgcttgaaaattgtttatcaaaaggaatgttcgatatattagagagatggaggaggaggagactggcgagagggtgtgtgtgtgagagagaagagaagagaacttgatatctccaatgatgtggagaagtactcgccaatcttgatatatggggatttgccatccaggatttgtaggtgttggatcttgtttatttatgtattctttctgtttatgtttctgtttctgtttctgtttctgtttctatttccctttcttgattctatatctgtatctatatatatgctaaattgtaggttgtaggttgtagaaaggtgtcctgtatgaagtgtatgccatgccatgcgcaaaccctcacaatgacaatggcaatggcaatggtagactggaagagttactatagtatatagtattagctacagtcaaagatagagagctcccagggctatattatgtagtatatatatagagctagtatatattgcccctattatataaataaacccctgtcaacattccccatttcccctcctcactctttctccaataatgtccattggccatggacaagatctcaatcaccatctgcggagatggtggatgtggtatgttgcttctcttgtctcctgggaatttcctgactccgtgattcggtgccatgtttccgggtttcgcgcgatcgagatctgatcaaatcgggatgcaggcaaatcttcaatcacgatgcggctggtccgtagtcaatgggttcacgagtaaggatatctccctggtcttggaaacctagtgctaatatttcattgctagatatgatccaacaatcggtattgcgccattcccacgcccttccaatgcccttccacttctaatcgggcccagaggattcctactccgtcactcgcaccgtcgacggtcgcccctacgtcctttccatcaccgatactgcaggccaggaggagtaccgggggctatggtctgcctcgaccctgagttcagatgccttcctcctagtttacgatatcaccaacccgtcgagtcttgaaacgctggatcatttcatggagatgattgatatggaggcggaacagcgcgtcgaggacaaccagcaactgcgccagaggttggggaatcgatatgggggtctcggccacgtaggcatgccaccgccggtcaaagtcatcgcgggcaacaaatgcgatctcaaggacggtcgcgcggtgacatcccgcgacggactggcctatgcgcgcaagcatggctgcgggtttatggagaccagcgctcgcgagacagtcaacatcgaggagacttttgcccgtatgacacacggtctgtcaaccaagaaggagagagagagagctaacggtcggatagatttaatccgtcgcgttgtcgaagcccgccgactccaatgtcaacagggtgttcttcctcccagcgaaccatcgcacacggcgctcccgaccagcacggtggacgcagttgcagagaccaaatcccgtcgaagtcgggcgtgggagtttatcaaacaccggaagacaacggaaccaaacggcgaacagggtcaggaacagagtgaaatgcaaaacggaaccgaaaaagagaaggggccgggtcaagggtgcgaaccggatgaacggtgcgctcgtcaggtgtggtgttttcgctgttgatttgaattgcggagcgaagcgaagcaattgaaacagcaacgtatccattatgtatagtacctggcatctgtgggcaatgtgtatatttctgtgtcgtagcattggatcttggatcttgtatcttgtatcttgtagaggaacatgtacataaagttcggggtgaatagggtcaaagggtcaacgggccaggtcaaggatgaatggactcggaatgcgtctccgacaatcaactacgggatatgatgctgaatagagggagctcccatggacaaattgaagtctgaatttgatagatgatttcatagggattagatttagatcgtcacatatttccaaaagcagtaagtatttagctaagctttgtgaacggaaacccagccgagaagaaaagaaataggaggaaaataggagacgccagcaatcgaaacaggatatcattctagaagcgaggcctagcccttgctcacgcccaacagggacatagttccttattgggcgatcctcggaatggtcacgtcatggactcgaagggccatcaccttgacggatgacaattggtgatagtctgagaggcctatcatgaatcatggagatgacctcaggattgaatagaatacacagtttacagtaaatggatagaatgcagtctcgaagctattcggcatgggcttgccgatttaatgtccgctgacataggcagtataaggattgcatagttatgcaaactgaggatattcaccatgtacatctgttcttctactcttctaccgatgttggagatgttgtattctatatgctttcgatattcgaattctctctattcgaattctctcgctctgaggattctaccattctcccattctctataataataatcaatatccactcctatacgtcagaaacacttcccaaatgccgagtcatcctgtatttttcccgtaacacccccgtaccgtcatttatgatcttcgatccgatcccttttttatgtccagcgagactcgagactccagtgactctaagaagaaaagccagagaatattatttttataaaaataataatccgaaacgagtagggcccctcttttcgtgattcctatatatgcacatcgacgcccatggtgacctgggatgttacttttctttaagagtctattacttcactcgagcatcttcctagatcactactctcctctctctattatttctttaaaccttcttatatccacggtccccagcatttctctctctgcatccgtctactctattggaactcaatttctcttaatctgtgaacatcattatatcattgacattttgacgtcgatcatcctccctctcgaagtatagctaaggctcggattcctgttcttctctctacactttcgaccacaaatcatggcagctcgacaatcaacacccacctccgagcactcgcattcggatagtaatgtccgtaaaagagtatgcaaagcttgcgatcggtgtcgtttaaagaaatccaaggtatgtacagctaaacgaatcaaccctcccaacatccactgaccctccggacagtgtgacggatccagtccttgttcccggtgtcgtgccgataatgccatctgcgtctttggagagcgcaagaaggcacatgacaaagtgtacccgaaggggtaagcgacatcaaacagtcctagctcgaaactcctcccactgaccagctctctccttctagttacgtcgagatgcttgaacagcaacaatcttggctggtccatggcctccaggaactctatcgacgcaacatcgaaggcgaaggctggcccggcgagcagctgaaactcgaacccaacggtcacccactcacccacgaccttctcatgcgcctcggcgccctcgacggctccaagggcgagcgcttcgaagaaaaccccgaagccttacagcaggatctgtggcacaccaacgccggcatgcaacgccaggaatcgtccgacggtggctccgatagcccccagtcaccagtgccccgttcacgcttctcctccgatgctttctcccagcaacacatgccgcccacaccgcccacatatagtcccacgacgcgtgcgcccatcaagaccgagcagccttctcaatctcagatgcccagcaccccgcaattcacgcaacctttgtccatgcaaggcgtcgtcaacccactggcgttgcaaagtccgcagcagtggcctagtagcgggttcaattctttcgacgagatggacttgatgtccacggccgattactccaatatgccctttgacgaccagcagttgtcgtcgccgatgttcaatcgccaggtgcccttgagctgtttgtcgcaagggtcatatctcgattccaaggactatgacgatttcaaccagttcctcaatccgaaccccacagagatcacctcgatctgagcccttcttctaagctattttgagctatcctgagctatcttgcgccatcttgagctcaccctgagccttatcctttcaaggatcgactattttaacgccgtatgacgtgatgcatgtatactatacatgttctgtttttctttctcttctcttctggggctattttcccccgcaagttctgttgatcggattcaggcgcaattgggatcctaatcacctctgtacagtgaaccggttttcggagatttggagttattcttcttctattctctttcttctcttttttacactttgtttcctttctttctggcgttctaaaacggggtttcaaggagtcgtccatttattgtctaattagaattcaatgaagtttttaaggtcatgtcaccgttacaccatccgaaacgggaaatgatctcattcgacttgatatccacttagcagttacccaggtaccgttccagatcgaaaagatctacagaagtagcggagggagatgccgatttgctctagccctggagccctggatccctccatccttgccttaatccctggagggtcatggagttcgaacatcaatggagcaaacggcaataactcggaccttgatttggtattttattttctttttcgtatttttgatttttaataagattattgatcttccagctgactcagcggcccattccccactttgagcgattttcggatcctttttggctgcttacgtcagccattggcctgcgagagcccgcgaaaagtcgccgaatcccgatttttgccgttccggggcaaatgctccgacgccaaaatataaaaaatcgggactttggcctttggagatgagcatgttcatccttatttgaccgtggaacttatgttataaccttctggccaagccgtctccctcgtatacaacctgttcagtcacgaagtatatttgaacggccgaacacataaggccgagttatcgccaaacctgctttcgcaagaaaatgcctctcaatcccatgccaatccaacctaataccaacctaacgccaacccaatgctaaaactctattatatcctggtacctgccaatattaatatcaaacccttggcgtgtctccttttgttcttccgttcggtgggacacgagtccggggtatagatcccttcggacgccggacctcgttctctccgaacggatgcaggctgaccctaacgccgatgtgctatgtccgttctatgcgtgatatagtgtactgatctgattggagaataccagttcgatacacgttacggagtacgtagttggcttttttacctttgcgacaactgaggttatactttaaagtcgctcgccacaggtccagcccggtttgatatggattacggaagatgtcacgagttgagctttaccctaattgggtcatggccaaaatattcaaagccctctcttttagtctaatcaacctgaatccggaccctcttagacaaataaacacctctcaaagccttggatattaacatttatgctaaaccaaaataaaggagtcatgttgtcggtgcttgatcccgcagattgcggggttgctaacgtcatgtcgcttaaaaaatttagagtacatgctatgcccttctttccccgcctatctcatccttcgagagcaaatcacataaaaggaaccgcatcatgtccgaacaagctgctttccacttcctgcctttgggcgccatcatccaaaccttctccgtcggtggtaagaacatcgttctgaatttccctacgcaggaggactatgtcaagcacaataccccacactatggtgccaccatcggccgtgttgcaaaccgtatcaaggatggtctgattcaggagctaaatggccagaaggttcaactggtgcagaacaacggccctaattccctgcatggtggggagaacaattgggctaagcgcgtctttgacggcccattcaccgtccagcgcaatggtcacgatgccgtgcacttcaagtacctctgcagagatggttcggagggattccccgggaccatcgaggtgcgcgtgtggtacatcgctagcaacgaggacgccaagaccgtgctgacggccgagtacgaggtggaatttgttggcaacgagtacgaggtggaatttgttggcaacgagtgcgaggagactgtagttaatatcaccaaccacaggtagatctagccccttcccccttcaaagctgatgacgacattcaatcttgaaattggagctattccccgctgaccaagcttccccccacctctcacagctactttaacattggcgatggccccgatatttcaggcaccaccgcccagctcgctacagccgactatctgcccctcgatagcacgggcattccctcgggtgagatcgccaagttcccgcgggacgtgacagccccgttcgcgctcgccgcaaccggcgcacacttcgacgacgtctttgtgctcgagtccgatcctagcaaaatccccctggacactcgtggcttaccgctacgccgtctagcccagtttagcaatgcaagctcgggcctacatctcgaagtgtacagcaccgagcctgccttccaattctacactggcaagtacctcgatgtgccatcggtcaacggggcaccagcacatcatgaaggagctgcattctgtgtggaacctagtcggttcgtgaatgcgattaacgagcctgcgtggcggtccatggttctgctgaagaagggtcaactgtttggctgcaagactgtttacaaggcgtggaaggcctgaaggggcctaaaagaggatagcagtatggagtcctgggtacatcggtggatcttgagacatttttcagcattcaagtcaagaggagtggagatcgacctagccatgtatgtatctttgattactatacaaggaacctcggcattgtatagacattgtaatcccaaaagaattttaaaaaaataaaagaataaaaaataaaatgccgaagccgaccaagttatctccgtcgtcccgggtcctcggcagcccgtgtttccctttggaatttgagttcttcttgtatcagatgattctctgcgttcatatatgcgaacgtctctcttgtcacctaacgagatacctctatatacctaggagatatgtagtatgtgtagaggtataccaactcaaaacaattacccaattcgtgaccttcgtgacccgctctcttcgagaataatctcttctccactgtgaatgtcaagcccgtgacgatctatcttttttagtgtgccgcattcccggaatgtggcgctataagatactattagttttttttattcttattgttacggatataggatttgttttagggtttgcttatagttagctatattacgcgataatctacaacaatctcaataataggacacaaccatatggcctgttagcctgggcttactctttttgcgtagtttaatctatctgggtgtatgttgaatcactaattgactacatgtaactgactacatgtattatcgtatactcccacgtgacctcggccacaatcggactccggaccgggccaacccgagcttcttcaccccgcgcgggggaacttcgacatgcgaacacgcggatcaacacaacttctccaaataccttaatccaattcattattcaatctactccacttacaatggccctggctcacggagacctgcgccatctactacccggcaactacaagcgcttcatcacatcttggctggaagaggactgccctagtctggactatggcggttttgttgtcggcgagtcagagggcgaggcccgactactaggaaagagcaaggtaaagagacagtgtctataatagattttcctaatccccccccccccaagaaagaacattcactgatcaactcagggcatcgtcgcaggcgtaccattcttcgacgaggtattctcgcaactaggctgcacgtaagccataccccactccaatcccaccccacctctctaatccatccagaatcgaatggcacatcaaagaaggcgaagcaatcaccccaattcagcactgcgcaaccgtccgcggccccatccgcaagatcctcctcggcgagcgcgtagccctcaacattctcgcgcgttgctcaggcatcgccagcaagagcgcctccatgcttgctgcgctgcgcgcgcaaggatggcaaggtaccctggccggtacaaggaagacaacgcctgggttccggcttgttgagaaatacggaatgcttgcgggtggcgccgacccgcaccgccacgatttgagctccatgaccatgctaaaggacaaccacgtgtgggcgtgcgcgaacaaccgcgctgcagccgatggtggcgttgcggacccgtcatcgcttgagtctattgcggcggcgatcccgcgcgctgtgcaggcggccaaggcaactggtgggttctcgactaaggttgaggttgagtgtcggagtgtggaggaggctaatgcggcgattggggctggggccgatatcattatgttggataactttacgcctgagggtgtgcgggaggctgcggcgcagctgaagcgcgaatgggcttcgaagaggcctttcttgattgaggtgagtggtggattgacggaagagaatgcgccggcgtatgtatgtgccgatatcgatatcttgtctaccagctccatccaccagggtacggggattgtggatttctcgctcaaggtatcgttgcggtagaaatgtatcatcgaattttggatgcatcctaatagagcagcatatcgacgtgtataaagtacaacgaaagaagaataaaatgcacaaaaaactccgacagtccctcaacaaggtattttagccccgaataacattaaaataaaagcctttcctcatgagtgattattacaagcatatgcgataagtgtcacgtggaagagaaacacaaacagacagtgggtatatatagcataggaaaaaaaagcgcggcaaaatcaaacttcgatgtccacggtgatgccctccccttcactggagctgggagcctcatctgaacccggagggcgactgggacggttgccatctgcaatggtccctgaaggtcctcgccgcctacgttcccggttgagctgatctcgaagtttctgattctcagcatcgcgctcctcaagtcgctcgcgggcgccactgcgatctaggaggcgaccttcacgttcagatttgagttgcctctccagcccatgtagtctgtgaatccatttctcatcgctaccattccagccactttgcgagctgcgcgtgcgtggtatcattgttccaggattgttggccaacgtgctgctggaagaggaatgagagggctgccctgtaacgttgcgagtggcgcctttctcggcgcgaggtctatcagtaccagccgtagagctagaacgccctagggatcggtccgactctgctcttgacgtcaaagaaggggagcggggtcctgccatgactgcagccgcagccgcagccacagacgcaggaccctgtcctcgcgcgttggnnnnnnnnnnnnnnnnnnnnnnnnnnnnnnnnnnnnnnnnnnnnngcaaaagaggggggggggggtcctgccatgactgcagccgcagccgcagccacagacgcaggaccctgtcctcgcgagttggattgaagtaggttgagttcagcctttagcagacggttctcgccacgcaatttagacatctccggagtggaactcgattgtccgcgaccggatcgcatgtttttgaaagcctcttcgaggcgctcgagcttcttgattcgtccgttatatgacagctcaagcgtgtgataacgcttggtcaactcgtggtcgatgctcttgatgcgagacttgaaacccgccatcacagcctcgacagtcttcattgcaagcagaaggttgcggctgaagcctggccagaacagcatattaccaatgacctcctggctcgggagattgccattgataagactgttggagtgcgcccaatccggcccgcaaagcccagagattctcttccaaatgttaagaaacatgatgttcctctcgttgagctggtccttgaattgctgttccagcgatgcgtatcttttgcggtcctcggtccgcgctttttccagatctgtgatacgggaattgctttgtgtgatggtccgagatgcgtgctgatgagatttgagcgacgactcaaatgactgcttgtcggctcgacgcgcatgtctttcgcgatccaggagttctgagagttttcgtgactcaagcccatgactctcgagcagagcgtcacgatttcgaagcagagattctttctcatctagctgtgagcggacgctctctaactcaagggcggtggactcgagttccttttgcagcttcatgatgttggtgatcaagctagaccggctgccgctgagatcacctagcgtttccctcaaattgttttcgaggtccatcaaccgttctcgccaggtggaggtttcaatctcctgggctgaaaggctcttcttcagacgtcggacctcctctttggaagctgaagcttcgcggttcaattcattcatgatacgctggacatcttgcttctccttacttcctaccacctctcgctggtgacgttcatctgccagtcgctgctcgagttctctggtcttctctttttcactaaccaagctcaggtggtagtttttgaggtccgattcgagatctccgatgcggatcttatcgccgtcttgctcttcgcgaaggaaagcgatttcattttggctcgattcaatctgcaccgtcagccgctgcaccttagtgttggcctcaaataggctcttctccatagattccatctcgcgattggtctcttcaagttcctgctgcacagacttgtacgcggccaggttgttctgtgcatcttcctcgagacggatgatgccttcgctggcagaacgcatttcggcctgcaaagccctgaggttttcgtcttggtttctcaagtcctcattcatacgctggcactcaacaattttctggtcgagttcgtctccaagggtatccaactcttcctgcgcttcggcccgcaggtcctggaaagcggcatctctttcattcgccatgtttacggcctggtctcgttcttgctgtaggttttgcatctcttcttcggcttgatcaacatcagcttggtatgccttgtcaagagcctctagttctgcaatatagtcctcaagttcggctcggatggcttgattctcaagcttgagggtcgacactaagtcccggagttgtccattccgggcttcgagttcatcgtggtccatgtcgctgcgcgacatacccgttccgtcgctagcctgagacgaaggtcggacatgagtgcgcgaggcggaacggtcgaagatactgtctcccgctatggatcggccaacatgacgacgctctccgagcttcaattcttcaatctcctgataaagacgttccttttctcggttacgagatgtgagcattgaagtctgggcactgacttcttttcttagttctgcattctcctgtttaaggagccccagctctacaacaagcgtgctgttgggaacggtaggaactcggttgccatctctatcagatgtatatgaaaaagagtcgtattggccgggctttgtagcagcgtatatctcacttcgcaaacgaatcgactcatcccgaagtcttcgattttcttcctcggcttgctctcgcgctgaggtttctgcgtcaagcatatccttccacatctcctgtatatataattagctcgggtctgacttgatcgtgttcgtctcacttactcgctcttccctcgcgccggcgtcggactctcccgcacgattatcgctgagcgacctgatcatctcggccaaccgtctcttctcactttcccgtgcaatagtttctgacctcatacgctcaatctcgagttcataagtttcaacccgttcacgtaggaagacgatctcttcgtcttgggccgagtcacgatcgccatcctctgatccctcggggtcatgattgaccatggaatccttgtcggattgatgttctttcacttgcttttccaagtctcgaatcttgcgtcttaggctttgattgtcctttgagagcttgaccttatctgattttagctcaacattctccgagatcatctccttgatgccttcctcggatcgcttgttcaacgcctcattaagaaagtgaattcgcatttttaggtcaaaattctccttcgccaagcgatcaatggtgctgctctgttccttgagggtcaagttccgaccacttttcgcaaacgcaggggccgaggcacccaaacgcttctccggaagtgcttggaagtcttctcggaaccgttgtgcaaacgtggtaggaatttgaatgtccttagctcgctcggcaattgctgtatcagtaggattgctgtcttgtggcttcgctttgggtgtcatcggtgttgaggcgtcttcgtggtccacagggctgatacgggaatgtggtgagccttcctcctccagcgtatgtaggccgccgtccattggaccagacatgtttgctttgtcgagtgggttttcttcgctatacccggagattccagatgccatgctgccgagactggttgtcctagccatcttggcacggctttcagcgtgcatggttccatagttgtcagaagtcgcgcccccagtttgaagggcatagtccgcgcccagtgtggcatcgctgttggttgtttcggtgttgttactggcggctgatgagtgtgacgaacgattggttgattgtcggctagtcaggtacttgggtcggctagctctccgactaccagtaggactggtactctggtcattagataagtgcgacgcaccgggcgataggctgcgggaggtgtttcgaagcttcgagggggtaagttgcgattcgttctcggccatggaatattcaggtctgaagggacgctcatcttgggagagcgggctggtttctagtgcatttttggacaatgtggatcgagtttgtcgcagcgctgcagctaccgtaggtgacgaggagtgggagtaagacaaggtattgttcgcatgttgtcctgtagggccaggtgccgagtccaaattcgtacctggcttctccttctcggtgtgttcttcgtcttccaccgggattttatcggctggttctatgaatgagagctgtgaggagtcctgtattatgtctgcagtgccattcttcggaaccccaactaggtacgtatcatccgcgccagcagtaggaccggtcgcagccacgtcaattgttgagggttccggcagaaagctcgattcaatgtccataagtttgcgacgcatttcgtgctcttcaattagggtttggttattgtcgcgttcgtggtcgccattttcgctcgatggatggaatagactgctctcgtcgtggtcaaccgaggaaggaataaaactatgatcgttcaaatctaattgggtcgatgtcatggtaaattcagggtcttcatggtcttcatggtcttggtctccatgatccggctctgaaggagttgattgcgcgtattcagatggcgactgtgtgaccgagttcgggggaagaatccccggtgcgtcctctgccatgaagtactctgaactgaaatcattcaatgtctgatctggcgtctggaataccgacacagacgaagagcgcactgaaactggggagatgacgcccaatgtttggggatccactcgctggatctcgctacccgcctcgatcggcgaatgagcggtcattgtatttggatgtatgggaaaagttgagaaagttgagaaagtcgcgaagagatggatttgtagtgttcaaattaagtgaagatgaaggtctgacttgaattcgaacatacttgaaagtcatctggcaagagcatatggcacaggagtagacgaatagtgtggacacggccaggataatgtaatggtattgccacgcagtatatataacatattcattactgccacgcgcatatcactcgactatacaacaagcatcgagaatcgagaatcgaatcaacagaaatatacaaatcgatgacattcatatgtaaaaacgataatcatggtatccatagcatcacatcaccatcccaagcattaatcggaataatccacccataacagaacattaataggaaagaggtatactagacaaagttgtatcaaacaaaagtcacgaaaaaaaaaagagaaaaggaccaagatatcgggcccttttgaaaggtaggtatcatggagtttccccaagccagaaaaaaaagaagtatatacagccggttcattaaaaggcgaaaagagaaagagtgtgcaattacgctgcaacttccgtaggctcaatggttgcctcctcatccacttgggggtagttggttgaagcaagaattctctctttagagctgatggcgttgcgtagggagtcgatatacgtgcgaaacttaacaatctcacgtaacagatacgaagatttccgttcccagttggccatggctttagcggcgttggggtggcgtggagagaatgcaaggttcatcgcagaacgcagctcattgtggcgagagagatcatcttccacgttctgcacgtagccctgcagggccttcaactgttcctcctctgtcaggttggaggcgaccatgctttgctgtggtgggctccagtcactgatgttgacccgatccgcgggaagtcggggccgcacaccctgatgatccatggagcttcggatggagctttgaatacttggccgtgcgcctgacgaaggcggcggggatcgattttcaccgccgatcagcgcgctgttaatgacactgtcgctccatccatattcaatattgctgatgcctcctatcagtggttgcttggataatcgcgcgctccagtagttggccgtggagacaaattctcggacaatctcaggcgttccagcttggaagagatgaaccgccccagtgggcaaactcagggcccagacatgaggacgagacttggagtatccaggcgatggtaaggcactggcaatggtctggcgcagcatgaacttccaaagctcttctgcattttccgtccagttgccaccaccgactataacccctccgcgctgtttagacttttgtcgcattgacttggtggagttgttgaacgagaaaagacgcatccagccttgctgtataaccgcaaaacagtcattccagttccggtccttggcccgtttgtccaccgcgtctagatgatgcttgtgttttaggctcccctccttggcccacggggcgccggctagagctaacgtatcatcttcaagcagaggggtcgttcgctcgggctcctcgtagctgtataccgaggtagcagagtcctccctgatgatggcctgactcagagcattggcaaacccgatagattgttggtactcgccgcgagggaagtctgaaccaaaagagtctacagacgctgaagtaaacttgcctaaagaatatttactccaggtactggacccagtcggactccagacaga
